(19) United States
(12) Patent Application Publication
(10) Pub. No.: US 2019/0330290 A1
(43) Pub. Date: Oct. 31, 2019

(54) PHARMACEUTICAL ASSOCIATION OF GROWTH FACTOR RECEPTOR AGONIST AND ADHESION PROTEIN INHIBITOR FOR CONVERTING A NEOPLASTIC CELL INTO A NON-NEOPLASTIC CELL AND USES THEREOF

(71) Applicant: HISTIDE AG, Schindellegi (CH)

(72) Inventors: Omar F. ZOUANI, Einsiedeln (CH); Veronika GOCHEVA, Einsiedeln (CH)

(21) Appl. No.: 15/761,031

(22) PCT Filed: Sep. 15, 2016
(86) PCT No.: PCT/EP2016/071795

§ 371 Date: Mar. 16, 2018

Related U.S. Application Data
(60) Provisional application No. 62/219,730, filed on Sep. 17, 2015.

(51) Int. Cl. C07K 14/47; A61P 35/00; C12Q 1/6886; C07K 5/09; C12N 15/113; C07K 16/28

(52) U.S. Cl. CPC C07K 14/4703; A61P 35/00; C12Q 1/6886; C07K 5/0817; A61K 38/00; C07K 16/2839; C07K 16/2842; C07K 16/2854; C12Q 2600/106; C12N 15/1138

(57) ABSTRACT

The present disclosure provides a pharmaceutical association comprising at least one growth factor receptor-binding compound, which activates at least one growth factor receptor of a neoplastic cell, and at least one adhesion protein inhibitor which inhibits at least one transmembrane cell adhesion protein of said neoplastic cell.

### FIELD OF THE INVENTION

[0001] The invention relates to associations, combinations, compositions, kits, methods and processes for the design, preparation, manufacture and/or formulation thereof, and methods and uses thereof for converting or recoding a neoplastic cell into a non-neoplastic cell and treating and/or preventing a neoplastic disease.

### BACKGROUND

[0002] Neoplastic cells, such as cancer cells, are generally characterized by abnormal and/or uncontrolled proliferation leading, in most cases, to the development of a neoplastic disease, such as cancer. Conventional methods for treating neoplastic diseases include surgical treatments, radiotherapy and chemotherapy.

[0003] Surgery is usually practised in order to extract localised (non-circulating) neoplastic cells from a patient's body and is most generally combined with radiotherapy treatments. As well as being limited to the treatment of very early stage, non-metastatic tumors, surgery is an invasive medical procedure which remains traumatic for the treated patient, involves the permanent removal of tissues or organs (which is sometimes not possible as some organs or organ parts are not accessible or cannot be removed due to life threatening consequences), in some cases has been shown to “unblock” dormant tumors, while only offering a “visual” selectivity to distinguish between healthy and tumor cells. Radiotherapy also presents some significant drawbacks for the treated patients including the high cost of the radiation therapy equipment, the high cost of the treatment itself, side effects associated with the damage or destruction of healthy cells, limited effectiveness against metastasized neoplastic diseases, skin rashes caused by external beam radiation, the potential deleterious impact on the functioning of tissues, glands or organs located near the site of treatment, and the possible development of secondary cancers as a result of exposure to the radiations.

[0004] Conventional chemotherapy methods generally involve the administration of small synthetic regulatory molecules which inhibit specific intracellular target proteins thought to be responsible for the neoplastic phenotype of the cell. One example is the inhibition of tyrosine kinase signal transduction by small molecule inhibitors to regulate uncontrolled cell proliferation. Typical chemotherapy methods also include treatments wherein DNA is covalently altered by e.g. DNA strands crosslinking, or treatments wherein the polymerisation and depolymerisation of microtubules is enhanced prevented thus provoking apoptosis of the damaged cell.

[0005] Another method for treating neoplastic diseases includes gene therapy wherein a missing or defective gene is replaced with a functional, healthy copy, which is delivered to the target dysfunctional cells using a “vector.” Gene transfer therapy can be done outside the body (ex vivo) by extracting bone marrow or blood from the patient and growing the cells in a laboratory. The corrected copy of the gene is then introduced and allowed to penetrate the cells' DNA before being injected back into the body. Gene transfers can also be done directly inside the patient's body (in vivo). Gene therapy has been applied to a few specific cases of blood cancers (chronic lymphocytic leukemia (CLL), acute lymphocytic leukemia (ALL) and multiple myeloma) through a particular form thereof in which the genetically modified cells were not the neoplastic cells themselves but instead the immune T-cells. Modified T-cells could then target and destroy specific blood cells (neoplastic as well as healthy). The body of the patient is then able to produce healthy blood cells and eventually provide a treatment to certain blood cancer types. However, gene therapy is generally best suited for the treatment of diseases caused by a single defective gene, not neoplastic diseases, which often involve multiple defective genes. Overall, issues such as the correct integration of therapeutic DNA into the genome; the immune system response to the introduction of foreign DNA into the cell; the toxicity, immune and inflammatory responses; gene control and targeting issues of the vectors (usually viral) required to transport the DNA inside the cell; the difficulties associated with the treatment of multigene-associated neoplastic cells; the possibilities of inducing tumors if the DNA is integrated in the wrong place in the genome; and/or the significant cost usually involved with such a therapy, have greatly undermined the development of gene therapy.

[0006] Other intracellular therapies have been contemplated for the treatment of neoplastic diseases using, for instance, micro-ribonucleic acids (miRNAs) or small interfering ribonucleic acids (siRNA). Under these conditions, the neoplastic cell is generally forced to down-regulate or repress the expression of one or more specific target genes (e.g. oncogenes) thus inhibiting the expression of defective and/or defecting proteins (e.g. oncoproteins). One example is the repression of genes encoding key proteins in the proliferation of cancer cells such as vascular endothelial growth factor (VEGF) and kinesin spindle protein (KSP), thus controlling cancer proliferation.

[0007] Neoplastic diseases may also be treated using immunotherapy such as antibody therapies wherein the antibodies bind to a target antigen typically on the surface of the neoplastic cell. Cell surface receptors are common targets for antibody therapies and include the epidermal growth factor receptor, HER2, CD52, the vascular endothelial growth factor-A and CD30. Once bound to an antigen (e.g. a cancer antigen), antibodies can induce antibody-dependent cell-mediated cytotoxicity, activate the complement system, prevent a receptor interacting with its ligand or deliver a payload of chemotherapy or radiation, which may all lead to the induction of neoplastic cell death. For instance, Cetuximab (Erbitux) is a chimeric IgG1 monoclonal antibody that targets the extracellular domain of the epidermal growth factor receptor (EGFR). Once a ligand binds to the EGFR on the surface of the cell, signalling pathways are activated inside the cell that are associated with malignant characteristics such as cancer cell proliferation and invasion. Cetuximab competitively inhibits ligand binding, thereby preventing EGFR activation and subsequent cellular signalling. It also activates programmed cell death (apoptosis).

[0008] Other intracellular treatments such as messenger ribonucleic acids (mRNAs)-based therapies have also been used in the treatment of neoplastic disease wherein administration of mRNA material into a neoplastic cell causes the neoplastic cell e.g. to express specifically encoded antigens and causing the neoplastic cell to be eliminated by the host immune system.

[0009] Differentiation therapy is another technique which was developed on the concept that the acquisition of the malignant phenotype (such as neoplasia) in a cell is considered as a progressive de-differentiation or a defective differentiation of that cell. Thus, as e.g. tumor cell populations evolve to greater degrees of malignancy, they usually lose more and more differentiation markers. This led to the suggestion that it may be possible to treat cancer by inducing differentiation of cancer cells. However, some scientific reports have shown that the differentiation therapy does not in fact induce cancer cells differentiation but instead restrains their growth thus allowing the application of more conventional therapies (such as chemotherapy) to eradicate the malignant cells. Examples of differentiation therapy involve the forced (re-)expression of some specific micro-RNAs and thus rely on an intracellular action generally presenting the same drawbacks as in any other intracellular therapies such the siRNA and gene therapies.

[0010] A shortcoming of the medical therapies relying on previously reported methods of treatment are numerous and mainly resides in the incapacity of providing a sustainable therapeutic effect i.e. the treated cells are not healed but instead are either destroyed (e.g. through induced apoptosis) or their proliferation reduced or temporarily halted using a sustained administration of therapeutic molecules until, in most case scenarios, neoplastic cells are able to adapt themselves and render the therapy ineffective. Interrupting a known therapy will usually lead to resumption of the neoplastic cell state.

[0011] Other drawbacks associated with previously reported therapies are numerous. For example, they may be very invasive and traumatic for the patient; they may necessitate permanently removing neoplastic tissues or organs which may be in some cases not practicable or feasible (organs or organ parts not accessible) or not possible due to life-threatening consequences; they may not be applied to or have limited effectiveness against metastatic neoplastic cells; they may not possess the ability to remove or treat all neoplastic cell types (i.e. neoplastic cells having different invasiveness levels and/or of different lineage origins); they may potentially “unblock” dormant tumors; they are often expensive; they may damage or destroy healthy cells alongside neoplastic cells thereby causing adverse treatment side effects; they may cause skin rashes and skin sensitivity; they may not target cancer stem cells as these are not proliferating; they may have a mutagenic action even towards healthy cells; they may require sustained administration to maintain treatment therapeutic effects; they may display very high cytotoxicity; they may cause multi-drug resistance whereby a drug having an intracellular action is no longer imported inside the cancer cell or is systematically exported outside of the cell.

[0012] None of these previously known methods allows for the effective recoding of a neoplastic cell thus permitting conversion of a neoplastic cell into a non-neoplastic cell.

[0013] The present invention thus provides associations, combinations, compositions, kits, methods and processes for the design, preparation, manufacture and/or formulation thereof, and methods and uses thereof for converting a neoplastic cell into a non-neoplastic cell including converting or recoding the neoplastic cell to induce, provide and/or reintroduce self-recovery or self-healing capabilities thereto.

### BRIEF DESCRIPTION OF THE DRAWINGS

[0014] FIG. 1 is: (a) a representation of a Quantitative Real Time PCR analysis of the expression of DMP-1, Sclerostin and RANK-L in neoplastic cells (osteosarcoma cells) cultured in the absence (control) or in the presence of pharmaceutical associations according to certain embodiments of the present disclosure comprising various GFR-binding compounds and adhesion protein inhibitors after 24 hours of culture, (P<0.001), (b) a 3D representation of a neoplastic cell without (control) and with an embodiment of the pharmaceutical association defined herein.

[0015] FIG. 2 is a representation of Quantitative Real Time PCR analysis of the expression of MLC-1, GATA-4 and a-Sarcomeric actin in neoplastic cells (Rabdomiosarcoma cells) cultured in the absence (control) or in the presence of pharmaceutical associations according to certain embodiments of the present disclosure comprising various GFR-binding compounds and adhesion protein inhibitors after 24 hours of culture, (P<0.005).

[0016] FIG. 3 is a representation of Quantitative Real Time PCR analysis of the expression of Sox-9, IBSP and Collagen-IV in neoplastic cells (chondrosarcoma cells) cultured in the absence (control) or in the presence of pharmaceutical associations according to certain embodiments of the present disclosure comprising various GFR-binding compounds and adhesion protein inhibitors after 24 hours of culture, (P<0.001).

[0017] FIG. 4 is a representation of Quantitative Real Time PCR analysis of the expression of MMP-9, Vimentin and a-SMA in neoplastic cells (adenocarcinoma cells) cultured in the absence (control) or in the presence of pharmaceutical associations according to certain embodiments of the present disclosure comprising various GFR-binding compounds and adhesion protein inhibitors after 24 hours of culture, (P<0.005).

[0018] FIG. 5 is (a) a diagram representing a relative quantification from western blot of the amount of p53 protein present in neoplastic cells (osteosarcoma cells) cultured in the absence (control) or in the presence of pharmaceutical associations according to certain embodiments of the present disclosure comprising various GFR-binding compounds and adhesion protein inhibitors after 24 hours of culture, (b) a diagram representing a relative quantification from western blot of the extent of phosphorylation of the pRB protein present in neoplastic cells cultured without (control) and in the presence of pharmaceutical associations according to certain embodiments of the present disclosure comprising various GFR-binding compounds and adhesion protein inhibitors after 24 hours of culture.

[0019] FIG. 6 is diagrams representing a relative quantification from western blot of the extent of phosphorylation of the ERK protein (a) and of the Src kinase (b) present in neoplastic cells (osteosarcoma cells) in the absence (control) or in the presence of pharmaceutical associations according to certain embodiments of the present disclosure comprising various GFR-binding compounds and adhesion protein inhibitors after 24 hours of culture, (c) a diagram representing a relative quantification from western blot of the amount of PDK1 protein present in neoplastic cells cultured in the absence (control) or in the presence of pharmaceutical associations according to certain embodiments of the present disclosure comprising various GFR-binding compounds and adhesion protein inhibitors after 24 hours of culture.

[0020] FIG. 7 is a representation of a Quantitative Real Time PCR analysis of the expression of Paxillin (a) and Vinculin (b) in neoplastic cells (osteosarcoma cells) cultured in the absence (control) or in the presence of pharmaceutical associations according to certain embodiments of the present disclosure comprising various GFR-binding compounds and adhesion protein inhibitors after 24 hours of culture, (P<0.001).

[0021] FIG. 8 is a representation of a Quantitative Real Time PCR analysis of the expression of Cyclin D (arithmetic mean of gene expression of Cyclin D1, D2 and D3) at different time intervals during 24 hours in neoplastic cells (osteosarcoma cells) cultured in the absence (control) or in the presence of pharmaceutical associations according to certain embodiments of the present disclosure comprising various GFR-binding compounds and adhesion protein inhibitors.

[0022] FIG. 9 is (a) a representation of a Quantitative Real Time PCR analysis of the expression of DMP-1, SCT and RANK-L in neoplastic cells (osteosarcoma cells) cultured on a native polymer scaffold (control) and on a polymer scaffold grafted with a mixture comprising a GFR-binding compound as defined in the present disclosure and a RGD peptide, after 24 hours of culture, (b) immunofluorescence staining of a representative neoplastic cell (osteosarcoma cells) cultured on a polymer scaffold grafted with a mixture comprising a GFR-binding compound as defined in the present disclosure (ID SEQ NO: 2) and a RGD peptide, after 24 hours of culture. The actin filaments were immunostained by using Alexa 488-phalloidin. The focal adhesions were represented by immunostaining with anti-vinculin. The nucleus was stained with DAPI and is represented by a circle in the center of the cell. Scale bar: 5 μm. (c) is a diagram representing the grafting density of a radiolabeled GFR-binding compound as defined in the present disclosure covalently grafted on a polymer scaffold and of a radiolabeled GFR-binding compound and a non-labeled RGD peptide both grafted on a polymer scaffold. The measurements were performed by using radioactivity quantification (no significant difference was observed). (d) Western Blot analysis of the expression of integrin subunits (α and β) in neoplastic cells cultured on a non-modified polymer scaffold, after 24 h of culture. (e) Immunofluorescence staining of a representative neoplastic cell (osteosarcoma cells) cultured in presence of different integrin subunits (α and β) couples (anti-α3β1, anti-αvβ3 and anti-α5β3).

[0023] FIG. 10 is (a) Western blot analysis of the expression integrin α3 and β1 before and after transduction with two independent integrin α3 and β1 shRNAs, which efficiently reduced endogenous integrin α3β1 protein levels. (b) Immunofluorescence visualization of a neoplastic cell (osteosarcoma cells) after silencing integrins α3β1 by using shRNAs, after 24 hours of culture on a polymer scaffold covalently grafted with RGD peptides. The silencing of these specific integrin proteins were shown to significantly reduce or suppress neoplastic cell adhesion on the RGD grafted polymers. The actin filaments were immunostained by using Alexa 488-phalloidin. The focal adhesions were represented by immunostaining with anti-vinculin. The nucleus was stained with DAPI and is represented by a circle in the center of the cell. Scale bar: 5 μm. (c) Immunofluorescence visualization of neoplastic cells cultured on a polymer scaffold covalently modified with a mixture comprising a GFR-binding compound as defined herein (SEQ ID NO: 2) and a RGD peptide, after 24 hours of culture. Scale bar: 500 μm. A magnification of one region (right, Scale bar: 50 μm) indicates that Spheroid-like structures of neoplastic cells become predominant in this case as a result of the RGD induced integrin engagement. The actin filaments were immunostained by using Alexa 488-phalloidin. The focal adhesions were represented by immunostaining with anti-vinculin. The nucleus was stained with DAPI and is represented by a circle in the center of the cell.

[0024] FIG. 11 is a screen shot of the Standard Protein Blast online software used in the RMSD calculation procedure.

### DETAILED DESCRIPTION

[0025] Neoplastic diseases start when a cell (or neoplastic cell) is somehow altered so that it multiplies out of control. Tumors and cancers are some examples of neoplastic diseases. A tumor is a mass composed of a cluster of such abnormal cells. Most cancers form tumors, but not all tumors are cancerous. Benign, or non-cancerous, tumors—such as freckles and moles—stop growing, do not spread to other parts of the body, and do not create new tumors. Malignant, or cancerous, tumors crowd out healthy cells, interfere with body functions, and draw nutrients from body tissues. Cancers continue to grow and spread by direct extension or through a process called metastasis, whereby the malignant cells travel through the lymphatic or blood vessels, eventually forming new tumors in other parts of the body.

[0026] The term “cancer” generally encompasses more than one hundred diseases affecting nearly every part of the body, and all are potentially life threatening. The major types of cancer are carcinoma, sarcoma, melanoma, lymphoma, and leukemia.

[0027] Carcinoma is a type of cancer that develops from epithelial cells. Specifically, a carcinoma is a cancer that begins in a tissue that lines the inner or outer surfaces of the body, and that generally arises from cells originating in the endodermal or ectodermal germ layer during embryogenesis.

[0028] Sarcoma is a cancer that arises from transformed cells of mesenchymal origin. Thus, malignant tumors made of cancerous bone, cartilage, fat, muscle, vascular or hematopoietic tissues are, by definition, considered sarcomas. This is in contrast to a malignant tumor originating from epithelial cells, which are termed carcinoma. Human sarcomas are quite rare. Common malignancies, such as breast, colon, and lung cancer, are almost always carcinoma.

[0029] Melanoma is a type of skin cancer, which forms from melanocytes (pigment-containing cells in the skin).

[0030] Lymphoma is a group of blood cell tumors that develop from lymphocytes. It is sometimes used to refer to just the cancerous ones rather than all tumors. There are two main types: Hodgkin lymphoma (HL) and non-Hodgkin lymphoma (NHL), with two others, multiple myeloma and immunoproliferative diseases, also included by the World Health Organization within the category. Non-Hodgkin lymphoma makes up about 90% of cases and includes a large number of sub-types. Lymphomas are part of the broader group of neoplasms called tumors of the hematopoietic and lymphoid tissues.

[0031] Leukemia is a group of cancers that usually begins in the bone marrow and results in high numbers of abnormal white blood cells. These white blood cells are not fully developed and are called blasts or leukemia cells. Symptoms may include bleeding and bruising problems, feeling very tired, and an increased risk of infections. These symptoms occur due to a lack of normal blood cells. Diagnosis is typically by blood tests or bone marrow biopsy.

[0032] Cancers include, but are not limited to, Adrenal Cancer, Anal Cancer, Bile Duct Cancer, Bladder Cancer, Bone Cancer, Brain/CNS Tumors In Adults, Brain/CNS Tumors In Children, Breast Cancer, Breast Cancer In Men, Cancer in Adolescents, Cancer in Children, Cancer in Young Adults, Cancer of Unknown Primary, Castleman Disease, Cervical Cancer, Colon/Rectum Cancer, Endometrial Cancer, Esophagus Cancer, Ewing Family Of Tumors, Eye Cancer, Gallbladder Cancer, Gastrointestinal Carcinoid Tumors, Gastrointestinal Stromal Tumor (GIST), Gestational Trophoblastic Disease, Hodgkin Disease, Kaposi Sarcoma, Kidney Cancer, Laryngeal and Hypopharyngeal Cancer, Leukemia, Leukemia—Acute Lymphocytic (ALL) in Adults, Leukemia—Acute Myeloid (AML), Leukemia—Chronic Lymphocytic (CLL), Leukemia—Chronic Myeloid (CML), Leukemia—Chronic Myelomonocytic (CMML), Leukemia in Children, Liver Cancer, Lung Cancer, Lung Cancer—Non-Small Cell, Lung Cancer—Small Cell, Lung, Carcinoid Tumor, Lymphoma, Lymphoma of the Skin, Malignant Mesothelioma, Multiple Myeloma, Myelodysplastic Syndrome, Nasal Cavity and Paranasal Sinus Cancer, Nasopharyngeal Cancer, Neuroblastoma, Non-Hodgkin Lymphoma, Non-Hodgkin Lymphoma In Children, Oral Cavity and Oropharyngeal Cancer, Osteosarcoma, Ovarian Cancer, Pancreatic Cancer, Penile Cancer, Pituitary Tumors, Prostate Cancer, Retinoblastoma, Rhabdomyosarcoma, Salivary Gland Cancer, Sarcoma—Adult Soft Tissue Cancer, Skin Cancer, Skin Cancer—Basal and Squamous Cell, Skin Cancer—Melanoma, Skin Cancer—Merkel Cell, Small Intestine Cancer, Stomach Cancer, Testicular Cancer, Thymus Cancer, Thyroid Cancer, Uterine Sarcoma, Vaginal Cancer, Vulvar Cancer, Waldenstrom Macroglobulinemia, Wilms Tumor.

[0033] The activation of growth factor receptors (GFR) is commonly known to promote neoplastic cell proliferation. For instance, many cancer treatments rely on the inhibition of growth factors, growth factors receptors and/or downstream signalling proteins such as protein kinases. Such inhibitors include, non-exhaustively, anti-Met (e.g. ARQ-197), anti-VEGF (e.g. Bevacizumab), anti-VEGFR (e.g. Sunitinib or Semaxinib), anti-Her2 (e.g. Trastuzumab), anti-EGFR (e.g. Cetuximab, Gefitinib or Erlotinib), anti-PDGFR (e.g. Imatinib), anti-IGF-1 (e.g. IMC-A12), anti-Ras (e.g. Tipifarnib), anti-Raf (e.g. Sorafenib), anti-src (e.g. Dastinib or Saracatinib), anti-Mek (e.g. C1040 or PD-0325901), anti-PI3K (e.g. LY294002), anti-PDK (e.g. UNC01), anti-HSP90 (e.g. 17-AGG or IPI-504), anti-CDK (e.g. Flavopiridol) and anti-mTOR (e.g. Everolimus).

[0034] Unlike previously reported treatments, it has been surprisingly demonstrated that the pharmaceutical associations, combinations and compositions disclosed herein can be used to treat, prevent and/or diagnose neoplasms (e.g. tumors or cancers) by activating growth factor receptors of vertebrate cells (such as mammalian cells, especially human cells).

[0035] The present invention also aims at providing mechanisms for solving and/or avoiding at least one of, preferably a plurality of, the problems, issues and/or shortcomings associated with previously reported neoplasm treatment therapies.

[0036] The present disclosure thus provides embodiments for:
[0037] Converting or recoding a neoplastic cell to induce and/or promote and/or improve self-healing and/or self-recovery thereof, particularly within a shorter period of time
[0038] Converting or recoding a neoplastic cell to induce and/or promote and/or improve self-healing and/or self-recovery thereof, particularly with a higher conversion yield;
[0039] Restoring a neoplastic cell's ability to undergo conversion into a physiologically functional and/or healthy cell, particularly within a shorter period of time;
[0040] Restoring a neoplastic cell's ability to undergo differentiation, particularly within a shorter period of time;
[0041] Converting and/or recoding a circulating or non-circulating neoplastic cell such as a cancer cell, into a non-neoplastic cell, particularly within a shorter period of time;
[0042] Protecting a subject from a neoplastic disease, disorder, condition, or pathology such as cancer, or any symptoms thereof, particularly within a shorter period of time;
[0043] Providing and/or producing a physiologically functional and/or healthy cell including an osteocyte and/or a chondrocyte and/or an adipocyte and/or a myocyte and/or a keratinocyte and/or a fibrocyte and/or a podocyte and/or a neurocyte and/or a mature endothelial cell and/or a osteoblast and/or a chondroblast and/or a neuroblast and/or a Sertoli cell and/or a Leydig cell and/or a germ cell and/or an endothelial cell and/or an angioblast and/or a fibroblast from a neoplastic cell, particularly within a shorter period of time;
[0044] Re-establishing, restoring and/or reactivating a cell adhesion checkpoint of a neoplastic cell;
[0045] Inducing and/or promoting and/or enhancing neoplastic cell differentiation, particularly within a shorter period of time;
[0046] Inducing and/or promoting and/or enhancing a decrease in Cyclin D gene and protein expression;
[0047] Inducing and/or promoting and/or enhancing a G1 to G0 cell cycle phase transition;
[0048] Inducing and/or promoting and/or enhancing the inactivation of a protein complex between a Cyclin D and at least one of Cyclin-dependent kinase (CDK) 4 or 6;
[0049] Preventing or reducing the phosphorylation of the retinoblastoma (Rb) protein thus activating its tumour suppressor functions;
[0050] Increasing the phosphorylation of the p53 protein thus reducing its degradation and activating its tumor suppressor functions;
[0051] Preventing or reducing the activation of the Ras/MAP kinase signalling cascade;
[0052] Identifying and/or analysing the features and/or markers of a neoplastic cell;
[0053] Regulating and/or activating growth factor receptors of a neoplastic cell;
[0054] Modulating and/or regulating the adhesion between a cell (in particular a neoplastic cell) and its micro-environment i.e. the surrounding extracellular matrix;
[0055] Treating, recoding or converting a neoplastic cell without temporarily or permanently damaging or killing said neoplastic cell and/or without permanently inducing a quiescent state thereof;
[0056] Dampening and/or reducing or suppressing cell division and/or cell proliferation of a neoplastic cell;
[0057] Activating and/or promoting and/or regulating anti-mitogen activity and/or tumor suppressor pathways in a neoplastic cell;
[0058] Inhibiting and/or reducing anti-oncogenic activity in a neoplastic cell;
[0059] Converting or recoding a neoplastic cell to induce and/or promote and/or improve self-healing and/or self-recovery thereof, and/or protecting a subject from a neoplastic disease, disorder, condition or pathology such as cancer using extracellular means;
[0060] Converting or recoding a neoplastic cell to induce and/or promote and/or improve self-healing and/or self-recovery thereof, protecting a subject from a neoplastic disease, disorder, condition or pathology such as cancer without modifying the genome of said cell;
[0061] Providing diagnostic tools for diagnosing neoplastic diseases in a subject.

[0062] I. Definitions

[0063] Those skilled in the art will recognize, or be able to ascertain using no more than routine experimentation, many equivalents to the specific embodiments in accordance with the invention described herein. The scope of the present invention is not intended to be limited to the present description, but rather is as set forth in the appended claims.

[0064] In the claims, articles such as “a”, “an”, and “the” may mean one or more than one unless indicated to the contrary or otherwise evident from the context. Claims or descriptions that include “or” between one or more members of a group are considered satisfied if one, more than one, or all of the group members are present in, employed in, or otherwise relevant to a given product or process unless indicated to the contrary or otherwise evident from the context. The invention includes embodiments in which exactly one member of the group is present in, employed in, or otherwise relevant to a given product or process. The invention includes embodiments in which more than one, or all of the group members are present in, employed in, or otherwise relevant to a given product or process.

[0065] It is also noted that the term “comprising” is intended to be open and permits but does not require the inclusion of additional elements or steps. When the term “comprising” is used herein, the terms “consisting of”, “consisting essentially of”, “consisting substantially of” and “consisting exclusively of” are thus also encompassed and disclosed.

[0066] As used herein, the term “approximately” or “about,” as applied to one or more values of interest, refers to a value that is similar to a stated reference value. In certain embodiments, the term “approximately” or “about” refers to a range of values that fall within 25%, 20%, 19%, 18%, 17%, 16%, 15%, 14%, 13%, 12%, 11%, 10%, 9%, 8%, 7%, 6%, 5%, 4%, 3%, 2%, 1%, or less in either direction (greater than or less than) of the stated reference value unless otherwise indicated, self-evident or contradictory in context (e.g. except where such number would exceed 100% of a possible value).

[0067] As used herein and unless otherwise indicated or contradictory in context, the term “with” followed by a specific number of amino acids, when used to define a particular peptide, variant or analog thereof, such as in “a peptide with three amino acids”, means that such peptide, variant or analog thereof, contains exclusively the specific number of amino acids specified after this term.

[0068] As used herein and unless otherwise indicated or contradictory in context, the term “Ci-alkyl” is intended to specifically and individually disclose any branched or unbranched radical, moiety or functional group having “i” carbon atom(s).

[0069] The carbon atom content of the various hydrocarbon-containing moieties herein may be indicated by a prefix designating the minimum and maximum number of carbon atoms in the moiety. For example, in certain embodiments, (Ca-Cb)alkyl indicates an alkyl moiety of the integer “a” to the integer “b” carbon atoms, inclusive.

[0070] At various places in the present specification, substituents of compounds of the present disclosure may be disclosed in groups or in ranges. It is specifically intended that the present disclosure include each and every individual sub-combination of the members of such groups and ranges. For example, in certain embodiments, the term “C1-C5 alkyl” is an abbreviation for (and thus is specifically intended to individually disclose) C1-alkyl (i.e. methyl), C2-alkyl (i.e. ethyl), C3-alkyl (i.e. 1-propyl and 2-propyl), C4-alkyl (i.e. 1-butyl, sec-butyl, iso-butyl and tert-butyl), and C5-alkyl (i.e. 1-pentyl, 2-pentyl, 3-pentyl, 2-methyl-1-butyl, 3-methyl-1-butyl, 2-methyl-2-butyl, 3-methyl-2-butyl, 2,2-dimethyl-1-propyl and 1,1-dimethyl-1-propyl).

[0071] As used herein, unless indicated otherwise or contradictory in context, the terms “alkyl” and “(Ca-Cb)alkyl” refer to monovalent hydrocarbon radicals containing the requisite number of carbon atoms as described above, having straight or branched moieties or combinations thereof. As used herein, alkyl groups may be optionally substituted with between one to four substitutes. Non-limiting examples of alkyl groups include, e.g. methyl, ethyl, n-propyl, isopropyl, n-butyl, isobutyl, sec-butyl, t-butyl, etc. Of course, other alkyl groups will be readily apparent to those of skilled in the art given the benefit of the present disclosure.

[0072] Where ranges are given, endpoints are included. Furthermore, it is to be understood that unless otherwise indicated or otherwise evident from the context and understanding of one of ordinary skill in the art, values that are expressed as ranges can assume any specific value or sub-range within the stated ranges in different embodiments of the invention, to the tenth of the unit of the lower limit of the range, unless the context clearly dictates otherwise. For example, in certain embodiments, a disclosed 0-10 range would, for example, in certain embodiments, also specifically and individually disclose the following values and ranges: 0, 1, 2, 3, 4, 5, 6, 7, 8, 9, 10, 0.1, 0.2, 0.3, 0.4, 0.5, 0.6, 0.7, 0.8, 0.9, 1, 1.1, 1.2, 1.3, 1.4, 1.5, 1.6, 1.7, 1.8, 1.9, 2, 2.1, 2.2, 2.3, 2.4, 2.5, 2.6, 2.7, 2.8, 2.9, 3, 3.1, 3.2, 3.3, 3.4, 3.5, 3.6, 3.7, 3.8, 3.9, 4, 4.1, 4.2, 4.3, 4.4, 4.5, 4.6, 4.7, 4.8, 4.9, 5, 5.1, 5.2, 5.3, 5.4, 5.5, 5.6, 5.7, 5.8, 5.9, 6, 6.1, 6.2, 6.3, 6.4, 6.5, 6.6, 6.7, 6.8, 6.9, 7, 7.1, 7.2, 7.3, 7.4, 7.5, 7.6, 7.7, 7.8, 7.9, 8, 8.1, 8.2, 8.3, 8.4, 8.5, 8.6, 8.7, 8.8, 8.9, 9, 9.1, 9.2, 9.3, 9.4, 9.5, 9.6, 9.7, 9.8, 9.9, 10, 0-1, 0-2, 0-3, 0-4, 0-5, 0-6, 0-7, 0-8, 0-9, 1-2, 1-3, 1-4, 1-5, 1-6, 1-7, 1-8, 1-9, 2-3, 2-4, 2-5, 2-6, 2-7, 2-8, 2-9, 2-10, 3-4, 3-5, 3-6, 3-7, 3-8, 3-9, 3-10, 4-5, 4-6, 4-7, 4-8, 4-9, 4-10, 5-6, 5-7, 5-8, 5-9, 5-10, 6-7, 6-8, 6-9, 6-10, 7-8, 7-9, 7-10, 8-9, 8-10, 9-10, 0-0.1, 0-0.2, 0-0.3, 0-0.4, 0-0.5, 0-0.6, 0-0.7, 0-0.8, 0-0.9, 0-1.1, 0-1.2, etc.

[0073] As used herein and unless otherwise indicated or contradictory in context, the term “substantially” refers to the qualitative condition of exhibiting total or near-total extent or degree of a characteristic or property of interest. One of ordinary skill in the biological arts will understand that biological and chemical phenomena rarely, if ever, go to completion and/or proceed to completeness or achieve or avoid an absolute result. The term “substantially” is therefore used herein to capture the potential lack of completeness inherent in many biological and chemical phenomena.

[0074] In addition, it is to be understood that any particular embodiment of the present invention that falls within the prior art may be explicitly excluded from any one or more of the claims using the appropriate disclaimer(s) or proviso(s). Since such embodiments are deemed to be known to one of ordinary skill in the art, they may be excluded even if the exclusion is not set forth explicitly herein. Any particular embodiment of the compositions of the invention (e.g., any peptide or peptidomimetic; any method of production; any method of use; etc.) can be excluded from any one or more claims, for any reason, whether or not related to the existence of prior art.

[0075] All cited sources, for example, in certain embodiments, references, publications, databases, database entries, and art cited herein, are incorporated into this application by reference in their entirety, even if not expressly stated in the citation. In case of conflicting statements of a cited source and the instant application, the statement in the instant application shall control.

[0076] As the case may be, and unless otherwise indicated or contradictory in context, macromolecules molecular weights should be understood in the present description as being number averaged molecular weights.

[0077] The peptides mentioned in the present description may not follow the usual representation conventions. For instance, the N-terminal amino acid of a peptide sequence may be the first amino acid in the sequence or the last amino acid. Likewise, the C-terminal amino acid of a peptide sequence may be the first amino acid in the sequence or the last amino acid. For example, in the peptide sequence NAIS, “N” may be N-terminal or C-terminal, and “S” may be N-terminal or C-terminal. Consequently, for the purpose of the present disclosure, e.g. NAIS also covers SIAN, SAIS also covers SIAS, SPIN also covers NIPS, etc.

[0078] In the present application, when reference is made to a certain peptide (e.g. a GFR-binding compound as provided herein) comprising one or more other peptide(s), said one or more other peptide(s) is(are) understood to be stably (in most cases, covalently) attached/bound to at least one part of said peptide. The attachment/binding may be located anywhere on the peptide unless indicated otherwise, contradictory in context or contradictory to general scientific rules. No specific attachment/binding location of said one or more other peptide(s) to said peptide shall be assumed unless specifically mentioned.

[0079] Peptide or polypeptide: As used herein, the term “peptide” or “polypeptide” are used interchangeably and refers to a polymer of less than or equal to 100 amino acids long, e.g., about 2, 3, 4, 5, 10, 15, 20, 25, 30, 35, 40, 45, 50, 55, 60, 65, 70, 75, 80, 85, 90, 95 or 100 amino acids long. The terms apply to amino acid polymers in which one or more amino acid residue is an artificial chemical mimetic of a corresponding naturally occurring amino acid, as well as to naturally occurring amino acid polymers, non-naturally occurring amino acid polymers, peptide analogs, peptide variants and peptide mimetics. Conventional techniques for synthesising peptides involve the activation of the carboxylic acid function of an amino acid or of a peptide, using a coupling agent. This activated acid is then contacted with an amino acid or a peptide in which the N-terminal amino acid is not protected, thus forming an amide bond also called peptide bond. Coupling reaction conditions together with coupling agents are well known in the art and described, for instance, in Greene, “Protective Groups in Organic Synthesis”, Wiley, New York, 2007 4th edition. In addition, suitable peptide synthesis routes are described, for instance, in Hojo H., Recent progress in the chemical synthesis of proteins, Curr Opin Struct Biol. 2014; 26C:16-23 and Saranya Chandrudu, et al., Chemical Methods for Peptide and Protein Production, Molecules, 2013, 18, 4373-4388, each of which is incorporated herein by reference in its entirety. There are two main strategies for peptide synthesis i.e. liquid-phase peptide synthesis and solid-phase peptide synthesis (SPPS) which is now most commonly used for peptide synthesis. Instead of C-terminal protection with a chemical group, the C-terminus of the first amino acid is coupled to an activated solid support, such as polystyrene or polyacrylamide. This type of approach has a two-fold function: the resin acts as the C-terminal protecting group and provides a rapid method to separate the growing peptide product from the different reaction mixtures during synthesis. As with many different biological manufacturing processes, peptide synthesizers have been developed for automation and high-throughput peptide production. SPPS allows the synthesis of natural peptides which are difficult to express in bacteria, the incorporation of unnatural amino acids, peptide/protein backbone modification, and the synthesis of D-proteins, which consist of D-amino acids. Very long peptide can be accessed by using native chemical ligation to couple two peptides together with quantitative yields.

[0080] Peptide analogs: As used herein, unless indicated otherwise or contradictory in context, the term “peptide analogs” refers to polypeptide variants which differ by one or more amino acid alterations, e.g., substitutions, additions or deletions of amino acid residues that still maintain one or more of the properties of the parent or starting peptide.

[0081] Peptide variants: As used herein, unless indicated otherwise or contradictory in context, the term “peptide variants” refers to a peptide which has a certain identity with a native or reference compound sequence. In one example, the peptide variant refers to any post-administration, application, injection modified peptide. Such post-administration, application, injection modifications include, but are not limited to, phosphorylation, acetylation, glutamylation, tyrosination, palmitoylation, glycosylation, myristoylation, palmitoylation, isoprenylation, glypiation, lipoylation, phosphopantetheinylation, acylation, alkylation, amidation, arginylation, polyglutamylation, polyglycylation, butyrylation, gamma-carboxylation, glycosylation, polysialylation, malonylation, hydroxylation, iodination, nucleotide addition, oxidation, adenylylation, propionylation, pyroglutamate formation, S-glutathionylation, S-nitrosylation, succinylation, sulfation, glycation, biotinylation, pegylation, ISGylation, SUMOylation, ubiquitination, Neddylation, Pupylation, citrullination, deamidation, eliminylation, carbamylation, and racemization.

[0082] Peptido-mimetic: As used herein, unless indicated otherwise or contradictory in context, the term “peptido-mimetic” or “peptidomimetic” refers to a synthetic chemical compound which comprises amino acids but not only and that is able to mimic the biological action of a peptide, often because the mimetic has a basic structure that mimics the basic structure of the peptide and/or has the salient biological properties of that peptide. In one particular example, a peptidomimetic is a hybrid molecule containing both, at least one peptide, and at least one of a polysaccharide, a polynucleotide or a linear or branched, saturated or unsaturated, hydrocarbon chain.

[0083] Linear peptide: As used herein, unless indicated otherwise or contradictory in context, the term “linear peptide” means a peptide in which the C-terminal and the N-terminal amino acid residues do not covalently interact with each other and none of the C-terminal or the N-terminal amino acid residues covalently interacts with another amino acid residue of the peptide chain.

[0084] Cyclic peptide: As used herein, unless indicated otherwise or contradictory in context, the term “cyclic peptide” means peptide in which the C-terminal and N-terminal amino acid residues do covalently interact with each other or the C-terminal and/or the N-terminal amino acid residues covalently interact with at least one other amino acid residue of the peptide chain so as to form a ring-like structure.

[0085] Amino acid: As used herein, unless indicated otherwise or contradictory in context, the term “amino acid” refers to naturally occurring and non-naturally occurring amino acids including amino acid analogs. Naturally occurring amino acids are those encoded by the genetic code, as well as those amino acids that are later modified, e.g., hydroxyproline, [gamma]-carboxyglutamate, and O-phosphoserine. Naturally encoded amino acids are the 20 common amino acids glycine (Gly, G), alanine (Ala, A), valine (Val, V), leucine (Leu, L), isoleucine (Ile, I), serine (Ser, S), threonine (Thr, T), phenylalanine (Phe, F), tyrosine (Tyr, Y), tryptophane (Trp, W), cysteine (Cys, C), methionine (Met, M), proline (Pro, P), aspartic acid (Asp, D), asparagine (Asn, N), glutamine (Gln, Q), glutamic acid (Glu, E), histidine (His, H), arginine (Arg, R) et lysine (Lys, K) and pyrrolysine and selenocysteine. Non-naturally occurring amino acids include, but are not limited to, the dextrogyre (D) isomers of the above-cited naturally-occurring amino acids. Amino acid analogs refers to compounds that have the same basic chemical structure as a naturally occurring amino acid i.e., an [alpha] carbon that is bound to a hydrogen, a carboxyl group, an amino group, and an R group (i.e. side chain), and which may be used in replacement thereof without substantially affecting the overall function of the peptide to which it belongs. Amino acid analogs (or non-naturally occurring amino acids) that may be suitable for implementing embodiments of the present invention include, but are not limited to, amino acids comprising a photoactivatable cross-linker, spin-labeled amino acids, fluorescent amino acids, metal binding amino acids, metal-containing amino acids, radioactive amino acids, amino acids with novel functional groups, amino acids that covalently or noncovalently interact with other molecules, photocaged and/or photoisomerizable amino acids, amino acids comprising biotin or a biotin analogue, glycosylated amino acids such as a sugar substituted serine, other carbohydrate modified amino acids, keto-containing amino acids, amino acids comprising polyethylene glycol or polyether, heavy atom substituted amino acids, chemically cleavable and/or photocleavable amino acids, amino acids with an elongated side chains as compared to natural amino acids, including but not limited to, polyethers or long chain hydrocarbons, including but not limited to, greater than about 5 or greater than about 10 carbons, carbon-linked sugar-containing amino acids, redox-active amino acids, amino thioacid containing amino acids, and amino acids comprising one or more toxic moiety. The term “AA^{I}” (AA roman numeral one) may be used in the description and refers to an amino acid which may be any amino acid as defined above in particular any naturally occurring and non-naturally occurring amino acids.

[0086] Amino acid side chain: As used herein, unless indicated otherwise or contradictory in context, the term “amino acid side chain” means the functional group of an amino acid that differentiates it from other amino acids. All amino acid structures have a carboxyl group, an amine group and a specific side chain.

[0087] AA^{II} (AA roman numeral two): As used herein, unless indicated otherwise or contradictory in context, the terms “polar amino acid” or “AA^{II}” means amino acids having a polar, non-charged group-containing side chain. Polar amino acids are protonated at physiological pH (about 7). Examples of polar amino acids include, but are not limited to, Cys (C), Asn (N), Gln (Q), Ser (S), Thr (T), or Tyr (Y).

[0088] AA^{III} (AA roman numeral three): As used herein, unless indicated otherwise or contradictory in context, the terms “acidic amino acid” or “AA^{III}” means amino acids having an acidic group-containing side chain. Acidic amino acid deprotonated forms predominate at physiological pH (about 7). Examples of acidic amino acids include, but are not limited to, Asn (N) and Glu (E).

[0089] AA^{IV} (AA roman numeral four): As used herein, unless indicated otherwise or contradictory in context, the terms “aliphatic amino acid” or “AA^{IV}” means amino acids having an aliphatic side chain. Examples of aliphatic amino acids include, but are not limited to, Ala (A), Leu (L), Ile (I), Gly (G), Val (V) and any analogs and derivatives thereof.

[0090] AA^{V} (AA roman numeral five): As used herein, unless indicated otherwise or contradictory in context, the terms “apolar amino acid” or “AA^{V}” means amino acids having an apolar side chain. Examples of apolar amino acids include, but are not limited to, Ala (A), Phe (F), Gly (G), Ile (I), Leu (L), Met (M), Pro (P), Val (V) or Trp (W).

[0091] AA^{VI} (AA roman numeral six): As used herein, unless indicated otherwise or contradictory in context, the term “aromatic amino acid” or “AA^{VI}” means amino acids having an aromatic group-containing side chain. Examples of aromatic amino acids include, but are not limited to, Trp (W), Tyr (Y) or Phe (F).

[0092] AA^{VII} (AA roman numeral seven): As used herein, unless indicated otherwise or contradictory in context, the term “basic amino acid” or “AA^{VII}” means amino acids having a basic group-containing side chain. Basic amino acid protonated forms predominate at physiological pH (about 7). Examples of basic amino acids include, but are not limited to, Arg (R), His (H), or Lys (K).

[0093] AA^{VIII} (AA roman numeral eight): As used herein, unless indicated otherwise or contradictory in context, the term “AA^{VIII}” means Leu (L) or Ile (I) and any analogs and derivatives thereof.

[0094] AA^{IX} (AA roman numeral nine): As used herein, unless indicated otherwise or contradictory in context, the term “charged amino acid” or “AA^{IX}” means amino acids having either an acidic group-containing side chain or an basic group-containing side chain. Charged amino acid charged forms predominate at physiological pH (about 7). Examples of charged amino acids include, but are not limited to, Asn (N), Glu (E), His (H), Lys (K) or Arg (R).

[0095] AAⁿ: As used herein, unless indicated otherwise or contradictory in context, the term “AAⁿ”, in which n is a positive integer arbitrarily chosen to identify a specific position within the primary sequence of a peptide. For instance, AA¹³ means the amino acid of position 13. The terms “amino acid” and “AA” are interchangeably used in the present description.

[0096] N-terminal: As used herein, unless indicated otherwise or contradictory in context, the term “N-terminal” means the amine (—NH₂) function/group/moiety located at one (terminal) end of a protein or polypeptide. This functional group is the only amine group which is not engage in n amide peptide bond.

[0097] C-terminal: As used herein, unless indicated otherwise or contradictory in context, the term “C-terminal” means the carboxylate (—CO₂H) function/group/moiety located at one (terminal) end of a protein or polypeptide. This functional group is the only carboxylic acid group which is not engage in n amide peptide bond.

[0098] Naturally-occurring peptide: As used herein, unless indicated otherwise or contradictory in context, the terms “naturally-occurring peptide” or “natural peptide” means a peptide which may be found in nature without human direct intervention (except for its extraction and/or isolation).

[0099] Synthetic peptide: As used herein, unless indicated otherwise or contradictory in context, the terms “synthetic peptide” or “non-natural peptide” means a peptide which may not be found in nature without human direct intervention (except for its extraction and/or isolation). For example, in certain embodiments, a synthetic peptide may have the amino acid sequence of a natural peptide except for at least one amino acid deletion or substitution relative to the natural sequence. In the case of a substitution, an amino acid from the natural sequence is replaced by another, different, naturally-occurring or non-naturally occurring amino acid. For example, in certain embodiments, a synthetic peptide may not possess a post-translational modification of the natural peptide such as the attachment of an acetate group, a phosphate group, a lipid, a carbohydrate, or the formation of a disulfide bridge.

[0100] Covalent interaction: As used herein, unless indicated otherwise or contradictory in context, the term “interact covalently”, “covalent interaction” or “covalent bond” are interchangeably used and means a chemical bond or interaction that involves the sharing of electron pairs between atoms. Examples of such interactions are σ-bonding and π-bonding.

[0101] Non-covalent interaction: As used herein, unless indicated otherwise or contradictory in context, the term “interact non-covalently”, “non-covalent interaction” or “non-covalent bond” are interchangeably used and means a chemical bond or interaction that does not involve the sharing of electron pairs between atoms but rather involves more dispersed variations of electromagnetic interactions between molecules or within a molecule. Non-covalent interactions can be generally classified into four categories, electrostatic interactions, π-interactions, van der Waals forces, and hydrophobic interactions.

[0102] Electrophile: As used herein, unless indicated otherwise or contradictory in context, the term “electrophile” means an organic molecule attracted to electrons that participates in a chemical reaction by accepting an electron pair in order to bond to a nucleophile. Most electrophiles are positively charged, have an atom that carries a partial positive charge, or have an atom that does not have an octet of electrons.

[0103] Nucleophile: As used herein, unless indicated otherwise or contradictory in context, the term “nucleophile” means an organic molecule that donates an electron pair to an electrophile to form a chemical bond in relation to a reaction. All molecules or ions with a free pair of electrons or at least one pi bond can act as nucleophiles.

[0104] Polysaccharide: As used herein, unless indicated otherwise or contradictory in context, the term “polysaccharide” means polymeric carbohydrate molecules composed of long chains of monosaccharide units bound together by glycosidic linkages and which upon hydrolysis provide monosaccharides or oligosaccharides. They range in structure from linear to highly branched polymers.

[0105] Polynucleotide: As used herein, the term “polynucleotide” or “nucleic acid”, which are used interchangeably, refers to the phosphate ester polymeric form of ribonucleosides (“RNA molecules”) or deoxyribonucleosides (“DNA molecules”), or any phosphoester analogs thereof, such as phosphorothioates and thioesters, in either single stranded form, or a double-stranded helix. The term “nucleic acid” includes double-stranded DNA round, inter alia, in linear (e.g., restriction fragments) or circular DNA molecules. In particular, nucleic acids as used herein refer to nucleic acids such as RNAs encoding for agonist of growth factor receptors as defined herein.

[0106] Nucleoside: As used herein, the term “nucleoside” refers to a compound containing a sugar molecule (e.g., a pentose or ribose) or derivative thereof in combination with an organic base (e.g., a purine or pyrimidine) or a derivative thereof (also referred to herein as “nucleobase”).

[0107] Nucleotide: As used herein, the term “nucleotide” refers to a nucleoside including a phosphate group.

[0108] Dendrimer: As used herein, unless indicated otherwise or contradictory in context, the term “dendrimer” means any repetitively branched molecules. Examples of dendrimers are phosphorous dendrimers, polylysine dendrimers, polypropylenimine dendrimers and PAMAM dendrimers, such as the ones described, for instance, in Scientific World Journal. 2013; 2013:732340; Curr Opin Chem Biol. 1998; 2(6):733-42; J Pept Sci. 1999; 5(5):203-20; and J Pept Sci. 2008; 14(1):2-43, which may be used for implementing embodiments of the present invention, each of which being herein incorporated by reference in its entirety.

[0109] Synthetic molecule: As used herein, unless indicated otherwise or contradictory in context, the term “synthetic molecule” means a molecule which may not be found in nature without human direct intervention (except for its extraction and/or isolation).

[0110] Synthetic polymers: As used herein, unless indicated otherwise or contradictory in context, the term “synthetic polymer” refers to a macromolecule or polymer which may not be found in nature without human direct intervention (except for its extraction and/or isolation).

[0111] Antibody: As used herein, unless indicated otherwise or contradictory in context, the term “antibody” encompasses the various forms of antibodies including, but not limited to, whole antibodies, human antibodies, humanized antibodies and genetically engineered antibodies like monoclonal antibodies, chimeric antibodies or recombinant antibodies as well as fragments of such antibodies as long as the characteristic properties according to the present disclosure are retained.

[0112] Monoclonal antibody: As used herein, unless indicated otherwise or contradictory in context, the term “monoclonal antibody” refers to an antibody obtained from a population of substantially homogeneous antibodies, i.e., the individual antibodies comprising the population are identical except for possible naturally occurring mutations that may be present in minor amounts. Monoclonal antibodies are highly specific, being directed against a single antigenic site. Furthermore, in contrast to polyclonal antibody preparations which include different antibodies directed against different determinants (epitopes), each monoclonal antibody is directed against a single determinant on the antigen. In addition to their specificity, the monoclonal antibodies are advantageous in that they may be synthesized uncontaminated by other antibodies. The modifier “monoclonal” is not to be construed as requiring production of the antibody by any particular method. For example, the monoclonal antibodies useful in the present invention may be prepared by the hybridoma methodology described by Kohler et al., Nature, 256:495 (1975), or may be made using recombinant DNA methods in bacterial, eukaryotic animal or plant cells (such as in U.S. Pat. No. 4,816,567). The “monoclonal antibodies” may also be isolated from phage antibody libraries using the techniques described in Clackson et al., Nature, 352:624-628 (1991) and Marks et al., J. Mol. Biol., 222:581-597 (1991), for example. All previously cited references being hereby incorporated by reference in their entirety.

[0113] Chimeric antibody: As used herein, unless indicated otherwise or contradictory in context, the term “chimeric antibody” refers to a monoclonal antibody comprising a variable region, i.e., binding region, from one source or species and at least a portion of a constant region derived from a different source or species, usually prepared by recombinant DNA techniques. Chimeric antibodies comprising a murine variable region and a human constant region are especially preferred. Such murine/human chimeric antibodies are the product of expressed immunoglobulin genes comprising DNA segments encoding murine immunoglobulin variable regions and DNA segments encoding human immunoglobulin constant regions. Other forms of “chimeric antibodies” encompassed by the present invention are those in which the class or subclass has been modified or changed from that of the original antibody. Such “chimeric” antibodies are also referred to as “class-switched antibodies.” Methods for producing chimeric antibodies involve conventional recombinant DNA and gene transfection techniques now well known in the art such as in Morrison, S. L., et al., Proc. Natl. Acad. Sci. USA 81 (1984) 6851-6855 and U.S. Pat. No. 5,204,244, which are hereby incorporated by reference in their entirety.

[0114] Humanized antibody: As used herein, unless indicated otherwise or contradictory in context, the term “humanized antibody” refers to antibodies in which the framework or “complementarity determining regions” (CDR) have been modified to comprise the CDR of an immunoglobulin of different specificity as compared to that of the parent immunoglobulin.

[0115] Human antibody: As used herein, unless indicated otherwise or contradictory in context, the term “human antibody” includes antibodies having variable and constant regions derived from human germline immunoglobulin sequences. Based on this technology, human antibodies against a great variety of targets can be produced. Examples of human antibodies are for example described in Kellermann, S. A., et al., Curr Opin Biotechnol. 13 (2002) 593-597, which is hereby incorporated by reference in its entirety.

[0116] Recombinant human antibody: As used herein, unless indicated otherwise or contradictory in context, the term “recombinant human antibody” includes all human antibodies that are prepared, expressed, created or isolated by recombinant means, such as antibodies isolated from a host cell such as a NS0 or CHO cell or from an animal (e.g. a mouse) that is transgenic for human immunoglobulin genes or antibodies expressed using a recombinant expression vector transfected into a host cell. Such recombinant human antibodies have variable and constant regions derived from human germline immunoglobulin sequences in a rearranged form.

[0117] Antigen: As used herein, unless indicated otherwise or contradictory in context, the term “antigen” is a predetermined antigen to which an antibody can selectively bind. The target antigen may be polypeptide, carbohydrate, nucleic acid, lipid, hapten or other naturally occurring or synthetic compound. Preferably, the target antigen is a polypeptide of the transmembrane receptor family such as integrins, syndecans, selectins or dystroglycans. An antibody “which binds” an antigen of interest, e.g. an integrin expressed on the surface of a neoplastic cell, is one that binds the antigen with sufficient affinity such that the antibody is useful as a therapeutic agent in targeting a cell or tissue expressing the antigen, and does not significantly cross-react with other proteins. In such embodiments, the extent of binding of the antibody to a “non-target” protein will be less than about 10% of the binding of the antibody to its particular target protein as determined by fluorescence activated cell sorting (FACS) analysis or radioimmunoprecipitation (RIA). With regard to the binding of an antibody to a target molecule, the term “specific binding” or “specifically binds to” or is “specific for” a particular polypeptide or an epitope on a particular polypeptide target means binding that is measurably different from a non-specific interaction. Specific binding can be measured, for example, by determining binding of a molecule compared to binding of a control molecule, which generally is a molecule of similar structure that does not have binding activity. For example, specific binding can be determined by competition with a control molecule that is similar to the target, for example, an excess of non-labeled target. In this case, specific binding is indicated if the binding of the labeled target to a probe is competitively inhibited by excess unlabeled target. The term “specific binding” or “specifically binds to” or is “specific for” a particular polypeptide or an epitope on a particular polypeptide target as used herein can be exhibited, for example, by a molecule having a Kd for the target of at least about 10⁻⁴ M, alternatively at least about 10⁻⁵ M, alternatively at least about 10⁻⁶ M, alternatively at least about 10⁻⁷ M, alternatively at least about 10⁻⁸ M, alternatively at least about 10⁻⁸ M, alternatively at least about 10⁻¹⁰ M, alternatively at least about 10⁻¹¹ M, alternatively at least about 10⁻¹² M, or greater. In one embodiment, the term “specific binding” refers to binding where a molecule binds to a particular polypeptide or epitope on a particular polypeptide without substantially binding to any other polypeptide or polypeptide epitope.

[0118] Constant domains: As used herein, unless indicated otherwise or contradictory in context, the term “constant domains” refers to domains that are not involved directly in binding the antibody to an antigen but are involved in the effector functions (ADCC, complement binding, and CDC).

[0119] Variable region: As used herein, unless indicated otherwise or contradictory in context, the term “variable region” (variable region of a light chain (VL), variable region of a heavy chain (VH)) refers to each of the pair of light and heavy chains which is involved directly in binding the antibody to the antigen. The domains of variable human light and heavy chains have the same general structure and each domain comprises four framework (FR) regions whose sequences are widely conserved, connected by three “hypervariable regions” (or complementarity determining regions, CDRs). The framework regions adopt a b-sheet conformation and the CDRs may form loops connecting the b-sheet structure. The CDRs in each chain are held in their three-dimensional structure by the framework regions and form together with the CDRs from the other chain the antigen binding site.

[0120] Hypervariable region: As used herein, unless indicated otherwise or contradictory in context, the term “hypervariable region” or “antigen-binding portion of an antibody” refers to the amino acid residues of an antibody which are responsible for antigen-binding. The hypervariable region comprises amino acid residues from the “complementarity determining regions” or “CDRs”. “Framework” or “FR” regions are those variable domain regions other than the hypervariable region residues as herein defined. Therefore, the light and heavy chains of an antibody comprise from N- to C-terminus the domains FR1, CDR1, FR2, CDR2, FR3, CDR3, and FR4. Especially, CDR3 of the heavy chain is the region which contributes most to antigen binding. CDR and FR regions are determined according to the standard definition of Kabat, et al., Sequences of Proteins of Immunological Interest, 5th ed., Public Health Service, National Institutes of Health, Bethesda, Md. (1991), and/or those residues from a “hypervariable loop”.

[0121] Biocompatible: As used herein, unless indicated otherwise or contradictory in context, the term “biocompatible” means compatible with living cells, tissues, organs or systems posing little to no risk of injury, toxicity or rejection by the immune system.

[0122] Biologically active: As used herein, unless indicated otherwise or contradictory in context, the term “biologically active” refers to a characteristic of any substance that has activity in a biological system and/or organism. For instance, a substance that, when administered to an organism, has a biological effect on that organism, is considered to be biologically active. In particular examples, a compound, substance or pharmaceutical composition of the present disclosure may be considered biologically active even if a portion of the compound, substance or pharmaceutical composition is biologically active or mimics an activity considered biologically relevant.

[0123] Stem cells: As used herein, unless indicated otherwise or contradictory in context, the term “stem cell” refers to the term as it is generally understood in the art. For example, in certain embodiments, stem cells, regardless of their source, are cells that are capable of dividing and renewing themselves for long periods, are at least to a degree unspecialized (undifferentiated), and can give rise to (differentiate into) specialized cell types (i.e., they are progenitor or precursor cells for a variety of different, specialized cell types).

[0124] Mesenchymal stem cells: As used herein, unless indicated otherwise or contradictory in context, the term “mesenchymal stem cells” generally means multipotent adult stromal cells that can differentiate into a variety of cell types, such as osteoblasts, chondrocytes, and adipocytes.

[0125] Stem cell-like: As used herein, unless indicated otherwise or contradictory in context, the term “Stem cell-like” refers to a cell which is not a stem cell by its origin but functions as a stem cell and presents similar characteristics such as, for example, the expression of stemness markers like Stro-1 and/or is multipotent thus has the ability to differentiate into various cell types.

[0126] Progenitor cells: As used herein, unless indicated otherwise or contradictory in context, the term “progenitor cells” generally means a biological cell that, like any stem cell, has a tendency to differentiate into a specific type of cell, but is already more specific than a stem cell and is pushed to differentiate into its “target” cell. Stem cells can generally replicate indefinitely, whereas progenitor cells can divide only a limited number of times.

[0127] Adult stem cells: As used herein, unless indicated otherwise or contradictory in context, the term “adult stem cells” means undifferentiated cells, found throughout the body after development, that multiply by cell division to replenish dying cells and regenerate damaged tissues. Also known as somatic stem cells, they can be found in juvenile as well as adult animals and human bodies.

[0128] Differentiation: As used herein, unless indicated otherwise or contradictory in context, the term “differentiation” refers to the process by which a less specialized cell becomes a more specialized cell type and involves a switch from one gene expression pattern to another.

[0129] Differentiated cells: As used herein, unless indicated otherwise or contradictory in context, the term “differentiated cells” generally means any cell of a specific lineage at the exception of cells containing stem cell specific markers.

[0130] Non-terminally differentiated: As used herein, unless indicated otherwise or contradictory in context, the term “non-terminally differentiated”, when used in relation to a cell, refers to a differentiated cell as defined herein which has not reached its final state of differentiation. For example, in certain embodiments, in the Osteoblast cell lineage, a non-terminally differentiated cell is any differentiated cell of the lineage at the exception of an osteocyte.

[0131] Terminally differentiated: As used herein, unless indicated otherwise or contradictory in context, the term “terminally differentiated”, when used in relation to a cell, refers to a differentiated cell as defined herein which has reached its final state of differentiation. For example, in certain embodiments, in the Osteoblast cell lineage, a terminally differentiated cell is an osteocyte.

[0132] Methods for obtaining stem cells: Methods for obtaining such stem cells and providing initial culture conditions, such as a liquid culture or semi-solid culture medium, are known in the art. The cells are initially expanded in vivo or in vitro, by contacting the source of the stem cells with a suitable reagent that expands or enriches such cells in the tissue source or in culture. Preferably, adult stem cells are isolated from a tissue source and then expanded or enriched in vitro by exposure to a suitable agent. Cells are obtained from an individual by any suitable method for obtaining a cell sample from an animal, including, but not limited, to, collection of bone marrow collection of a bodily fluid (e.g., blood), collection of umbilical cord blood, tissue punch, and tissue dissection, including particularly, but not limited to, any biopsies of skin, intestine, cornea, spinal cord, brain tissue, scalp, stomach, breast, lung (e.g., including lavage and bronchioschopy), fine needle aspirates of the bone marrow, amniotic fluid, placenta and yolk sac.

[0133] Cell lineage: As used herein, unless indicated otherwise or contradictory in context, the term “cell lineage” refers to the developmental history of a particular cell from its primary state in the fertilized egg or embryo through to its fully differentiated state. The different steps and phases involved in the development of a cell produces many intermediate cells which may be referred to as progenitor or precursor cells in the present application and form an integral part of the cell lineage.

[0134] Bone: It is conventionally known that mature osteoblasts are the cells responsible for bone formation and are derived from osteoblast precursors. Differentiation of human bone marrow mesenchymal stem cells and osteoblast precursors is one of the important processes for bone regeneration. Osteoblasts differentiate from mesenchymal stem cells. Mature osteoblasts differentiate from osteoblast precursors and into osteocytes which are non-dividing cells. Bone-related neoplastic diseases include, but are not limited to, bone primary tumors (benign tumors or cancers) such as osteoma, osteoid osteoma, osteochondroma, osteoblastoma, enchondroma, giant cell tumor of bone, aneurysmal bone cyst, fibrous dysplasia of bone, osteosarcoma, chondrosarcoma, Ewing's sarcoma, fibrosarcoma; and secondary tumors (i.e. metastasize) such as, for example, in certain embodiments, carcinomas of the prostate, breasts, lungs, thyroid, and kidneys.

[0135] Osteoblast cell lineage: As used herein, unless indicated otherwise or contradictory in context, the term “osteoblast cell lineage” refers to bone cells at any stage of their development and thus include, but are not limited to, mesenchymal stem cells, osteoblasts, osteocytes or any precursors thereof.

[0136] Cartilage: Native chondrocytes are responsible for the synthesis and turnover of the cartilage extracellular matrix (ECM), which provides an environment of nutrition diffusion for chondrocytes and provides the joint surface with biomechanical competence. Chondrogenic cells arise from pluripotential adult mesenchymal stem cells (MSCs) through a series of differentiation pathways. Chondrogenic differentiation of MSCs is induced by various intrinsic and extrinsic factors. Growth factors play an important role in this process. For instance, in the hyaline cartilage, growth factors regulate homeostasis and integrity, as well as development. Cartilage-related neoplastic diseases include, but are not limited to, Chondroma/ecchondroma/enchondroma (Enchondromatosis, Extraskeletal chondroma), Chondrosarcoma (Mesenchymal chondrosarcoma, Myxoid chondrosarcoma), Osteochondroma (Osteochondromatosis), Chondromyxoid fibroma, and Chondroblastoma,

[0137] Chondrocytic cell lineage: As used herein, unless indicated otherwise or contradictory in context, the term “chondrocytic cell lineage” refers to cartilage cells at any stage of their development and thus include, but are not limited to, mesenchymal stem cells, chondroblasts, chondrocytes or any precursors thereof.

[0138] Muscles: Skeletal muscle is a highly complex and heterogeneous tissue serving a multitude of functions in the organism. The process of generating muscle—myogenesis—can be divided into several distinct phases. During embryonic myogenesis, mesoderm-derived structures generate the first muscle fibers of the body proper, and in subsequent waves additional fibers are generated along these template fibers. In the perinatal phase, muscle resident myogenic progenitors initially proliferate extensively but, later on, decrease as the number of myonuclei reaches a steady state and myofibrillar protein synthesis peaks. Once the muscle has matured, these progenitors will enter quiescence and henceforth reside within it as satellite cells. Adult skeletal muscle, like all renewing organs, relies on a mechanism that compensates for the turnover of terminally differentiated cells to maintain tissue homeostasis. This type of myogenesis depends on the activation of satellite cells that have the potential to differentiate into new fibers. The most comprehensively studied form of myogenesis takes place when mature muscle is damaged and large cohorts of satellite cells expand mitotically and differentiate to repair the tissue and reestablish homeostasis. It is now generally accepted that satellite cells are closely related to progenitors of somitic origin. The activation of the network of transcription factors that controls skeletal muscle development depends on paracrine factors that are released by adjacent tissues, such as the neural tube, notochord, surface ectoderm and lateral mesoderm. Several secreted factors have been identified that determine the spatial and temporal onset of myogenesis. Signalling molecules, such as Noggin and bone morphogenetic proteins (BMPs)—which inactivate and activate receptors of the transforming growth factor-β (TGFβ) superfamily, respectively—are reported to participate in the orchestration of the activation of myogenesis. Muscle-related neoplastic diseases include, but are not limited to, Rhabdomyosarcoma, and Leiomyosarcoma.

[0139] Muscle cell lineage: As used herein, unless indicated otherwise or contradictory in context, the term “muscle cell lineage” refers to muscle cells at any stage of their development and thus include, but are not limited to, mesenchymal stem cells, myoblasts, myocytes or any precursors thereof.

[0140] Vascular: The vasculature in the human body forms through two distinct processes: vasculogenesis and angiogenesis. Vasculogenesis is defined as the process of de novo blood vessel formation occurring when endothelial precursor cells (angioblasts) migrate and differentiate into endothelial cells which form the new vessel. These vascular trees are then extended through angiogenesis which is defined as the new vessel formation secondary to proliferation of endothelial cells from pre-existing vessels. Vasculogenesis as well as angiogenesis occur during the embryologic development of the circulatory system but also in the adult organism from circulating endothelial progenitor cells (derivatives of stem cells) able to contribute, albeit to varying degrees, to neovascularization. Vascular-related neoplastic diseases include, but are not limited to, Hemangiosarcoma, Kaposi's sarcoma, Lymphangiosarcoma, and Infantile hemangio-pericytoma.

[0141] Vascular cell lineage: As used herein, unless indicated otherwise or contradictory in context, the term “vascular cell lineage” refers to vascular cells at any stage of their development and thus include, but are not limited to, mesenchymal stem cells, angioblast, pericytes and endothelial cells or any precursors thereof.

[0142] Neurons: It was recently reported that neural cells can be regenerated from neural stem cells (NSCs). These are self-renewing, multipotent adult stem cells that generate the main phenotype of the nervous system. They undergo asymmetric cell division into two daughter cells, one non-specialized and one specialized. NSCs primarily differentiate into neurons, astrocytes, and oligodendrocytes. NSCs are generated throughout an adult's life via the process of neurogenesis. NSCs can be differentiated to replace lost or injured neurons or in many cases even glial cells. NSCs are stimulated to begin differentiation via exogenous cues from their microenvironment, or the neural stem cell niche. This niche defines a zone in which stem cells are retained after embryonic development for the production of new cells of the nervous system. This continual supply of new neurons and glia then provides the postnatal and adult brain with an added capacity for cellular plasticity. Critical to the maintenance of the stem cell niche are microenvironmental cues and cell-cell interactions that act to balance stem cell quiescence with proliferation and to direct neurogenesis versus gliogenesis lineage decisions. Several proteins like different growth factors are involved in the mechanisms of the neural stem cell niche as well as in the maintenance and growth of the newly formed neurons. These include the BMPs, FGFs, PDGF, VEGF, TGF β, BDNF and others. Neuron-related neoplastic diseases include, but are not limited to, Anaplastic astrocytoma, Astrocytoma, Central neurocytoma, Choroid plexus carcinoma, Choroid plexus papilloma, Choroid plexus tumor, Dysembryoplastic neuroepithelial tumour, Ependymal tumor, Fibrillary astrocytoma, Giant-cell glioblastoma, Glioblastoma multiforme, Gliomatosis cerebri, Gliosarcoma, Hemangiopericytoma, Medulloblastoma, Medulloepithelioma, Meningeal carcinomatosis, Neuroblastoma, Neurocytoma, Oligoastrocytoma, Oligodendroglioma, Optic nerve sheath meningioma, Pediatric ependymoma, Pilocytic astrocytoma, Pinealoblastoma, Pineocytoma, Pleomorphic anaplastic neuroblastoma, Pleomorphic xanthoastrocytoma, Primary central nervous system lymphoma, Sphenoid wing meningioma, Subependymal giant cell astrocytoma, Subependymoma, and Trilateral retinoblastoma.

[0143] Neuronal cell lineage: As used herein, unless indicated otherwise or contradictory in context, the term “neuron lineage” refers to brain cells at any stage of their development and thus include, but are not limited to, neural stem cells, neuroblast, neurocyte and neuroglial cells or any precursors thereof.

[0144] Eye retina: The vertebrate retina is a light-sensitive layer of tissue, lining the inner surface of the eye. Retinal development involves a complex progression of tissue induction, proliferation of retinal progenitor cell (RPC) populations and terminal differentiation of these cells into specific functional types. Bone morphogenetic protein (BMP), is a member of the transforming growth factor (TGF)-β family of signaling molecules plays an important role in the retinal cell development. BMP-2, -4, and -7 and their receptors (BMPRs) are expressed in the eye during embryogenesis and are essential for multiple aspects of retinal development. Retina-related neoplastic diseases include, but are not limited to, Retinoblastoma. It should also be noted that eye cancers can be primary (starts within the eye) and metastatic (spread to the eye from another organ). The two most common cancers that would spread to the eyes from another organ are breast cancer and lung cancer. Other, less common, sites of origin include prostate, kidney, thyroid, skin, colon and blood or bone marrow.

[0145] Retinal cell lineage: As used herein, unless indicated otherwise or contradictory in context, the term “retinal cell lineage” refers to eye retina cells at any stage of their development and thus include, but are not limited to, photoreceptor, bipolar cells, rod and cone cells or any precursors thereof.

[0146] Kidneys: The kidneys are composed of complex tissues consisting of several different cell types including glomerular podocytes, endothelial cells, mesangial cells, interstitial cells, tubular epithelial cells, and connecting duct cells. These cell types interact to establish a precise cellular environment that functions as an efficient tissue. Kidneys-related neoplastic diseases include, but are not limited to, Squamous cell carcinoma, Juxtaglomerular cell, tumor (reninoma), Angiomyolipoma, Renal oncocytoma, Bellini duct carcinoma, Clear-cell sarcoma of the kidney, Mesoblastic nephroma, Wilms' tumor, Mixed epithelial stromal tumor, Clear cell adenocarcinoma, Transitional cell carcinoma, Inverted papilloma, Renal lymphoma, Teratoma, Carcinosarcoma, and Carcinoid tumor.

[0147] Renal cell lineage: As used herein, unless indicated otherwise or contradictory in context, the term “renal cell lineage” refers to renal cells at any stage of their development and thus include, but are not limited to, mesenchymal stem cells, podocytes, or any precursors thereof.

[0148] Ligaments and Tendons: Tendons and ligaments (T/L) are dense connective tissues of mesodermal origin. They connect and transmit force from muscle to bone and bone to bone, respectively. Both tissues are able to store elastic energy and withstand hightensile forces, on which locomotion is entirely dependent. T/L are predominantly composed of collagen type I fibrils organized in a highly hierarchical manner that is unique for the T/L. Other collagens (types III-VI, XI, XII, XIV, and XV) and various proteoglycans (decorin, cartilage oligomeric matrix protein (COMP), byglican, lumican, fibromodulin, tenascin-C, etc.) are building the remaining T/L substance. The cellular content of T/L is dominated by tendon-specific fibroblasts named tenocytes. During embryonic development, the tendon-specific cells descend from a sub-set of mesenchymal progenitors condensed in the syndetome, a dorsolateral domain of the sclerotome. L/T-related neoplastic diseases include, but are not limited to, Fibrosarcoma, Malignant fibrous, Hystiocytoma, and Dermatofibrosarcoma.

[0149] Ligament and tendon cell lineage: As used herein, unless indicated otherwise or contradictory in context, the term “ligament and tendon cell lineage” or “L/T cell lineage” refers to bone or cartilage cells at any stage of their development and thus include, but are not limited to, mesenchymal stem cells, fibroblasts, fibrocytes, or any precursors thereof.

[0150] Skin: The skin constantly renews itself throughout adult life. Stem cells (SCs) residing in the epidermis ensure the maintenance of adult skin homeostasis, but they also participate in the repair of the epidermis after injuries. The skin protects the body from dehydration, injury and infection. The skin consists of an underlying dermis, separated by a basement membrane from the multilayered overlaying epidermis. The dermis is of mesodermal embryonic origin and contains as adult stem cells fibroblastic mesenchymal stem-cell-like cells. These cells have a multi-lineage differentiation potential, being also able to form adipose tissue or bones. Skin-related neoplastic diseases include, but are not limited to, basal cell carcinoma, squamous cell carcinoma, malignant melanoma, dermatofibrosarcoma protuberans, Merkel cell carcinoma, Kaposi's sarcoma, keratoacanthoma, spindle cell tumors, sebaceous carcinomas, microcystic adnexal carcinoma, Paget's disease of the breast, atypical fibroxanthoma, leiomyosarcoma, and angiosarcoma.

[0151] Fibroblast lineage: As used herein, unless indicated otherwise or contradictory in context, the term “fibroblast lineage” refers to skin cells at any stage of their development and thus include, but are not limited to, mesenchymal stem cells, fibroblasts, keratinocytes, Merkel cells, melanocytes, Langerhans cells, and any precursor cells thereof.

[0152] Reproduction: Reproduction (or procreation) is the biological process by which new offspring individual organisms are produced from their parents. Sexual reproduction is a biological process by which organisms create descendants that have a combination of genetic material contributed from two (usually) different members of the species. The development and physiological functions of basic structures in the mammalian reproductive system are influenced by the tissue-specific expression of members of different growth factors families like the BMP family. The establishment of the germ line is a fundamental aspect of reproduction. Germ cell determination is induced in epiblast cells by the extraembryonic ectoderm, and is not acquired through the inheritance of preformed germ plasma. There is some strong evidence that BMP-4 and -8b play a central role in determining primordial germ cell (PGC) formation in the embryo. The genes encoding BMP-4 and -8b have overlapping expression in the extraembryonic ectoderm before gastrulation, i.e., before PGCs are seen. Thus, PGC formation requires BMP-4 expression. There is also evidence from knockout mammals that BMP-8b is required for PGC formation. Furthermore, there is increasing evidence that locally produced BMPs play a major role in the differentiation of the pituitary gonadotrope. Reproduction-related neoplastic diseases include, but are not limited to, Prostate cancer, Ovary cancer (adenocarcinoma, or glandular cancer) also known as carcinoma of the prostate or prostatic intraepithelial neoplasia.

[0153] Reproduction system lineage: As used herein, unless indicated otherwise or contradictory in context, the term “reproduction system lineage” refers to Sertoli cells, Leydig cell and Germ cell at any stage of their development, in particular, mesenchymal stem cells.

[0154] Blood: Blood is a bodily fluid in animals that delivers necessary substances such as nutrients and oxygen to the cells and transports metabolic waste products away from those cells. When it reaches the lungs, gas exchange occurs wherein carbon dioxide is diffused out of the blood into the alveoli and oxygen is diffused into the blood. This oxygenated blood is pumped to the left hand side of the heart in the pulmonary vein and enters the left atrium. From here it passes through the bicuspid valve, through the ventricle and taken all around the body by the aorta. Blood contains antibodies, nutrients, oxygen and much more to help the body work. In vertebrates, it is composed of blood cells suspended in blood plasma. Plasma, which constitutes 55% of blood fluid, is mostly water (92% by volume), and contains dissipated proteins, glucose, mineral ions, hormones, carbon dioxide (plasma being the main medium for excretory product transportation), and blood cells themselves. Albumin is the main protein in plasma, and it functions to regulate the colloidal osmotic pressure of blood. Hematopoietic stem cells (HSCs) are the blood cells that give rise to all the other blood cells and are derived from the mesoderm. They are located in the red bone marrow, which is contained in the core of most bones. The HSCs give rise to the myeloid lineage (monocytes and macrophages, neutrophils, basophils, eosinophils, erythrocytes, megakaryocytes/platelets, dendritic cells), and to the lymphoid lineages (T-cells, B-cells, NK-cells). The most abundant cells in the vertebrate blood are red blood cells (also called RBSs or erythrocytes). These contain hemoglobin, an iron-containing protein, which facilitates oxygen transport by reversibly binding to this respiratory gas and greatly increasing its solubility in blood. Blood-related neoplastic diseases include, but are not limited to, acute lymphoblastic leukemia (ALL), acute myeloid leukemia (AML), chronic lymphocytic leukemia (CLL) and chronic myeloid leukemia (CML).

[0155] Blood cell lineages (myeloid lineage and lymphoid lineage): As used herein, unless indicated otherwise or contradictory in context, the term “blood cell lineages” refers to blood cells at any stage of their development from the myeloid or from the lymphoid lineage, and thus include, but are not limited to, hematopoietic stem cells (HSC), myeloid progenitors, lymphoid progenitors, mast cells, myeloblasts, monocytes, macrophages, neutrophils, basophils, eosinophils, erythrocytes, megakaryocytes, thrombocytes, dendritic cells, small lymphocytes, T-lymphocytes (T-cells), B-lymphocytes (B-cells), natural killer (NK)-cells, and any precursor cells thereof.

[0156] Adipose tissue: Adipose tissue is loose connective tissue composed mostly of adipocytes. In addition to adipocytes, adipose tissue contains the stromal vascular fraction (SVF) of cells including preadipocytes, fibroblasts, vascular endothelial cells and a variety of immune cells (i.e. adipose tissue macrophages (ATMs)). Adipose tissue is derived from preadipocytes. Its main role is to store energy in the form of lipids, although it also cushions and insulates the body. Pre-adipocytes are thought to be undifferentiated fibroblasts that can be stimulated to form adipocytes. The pre-adipocytes originate from mesenchymal stem cells. Areolar connective tissue is composed of adipocytes. The term “lipoblast” is used to describe the precursor of the adult cell. The term “lipoblastoma” is used to describe a tumor of this cell type. Adipose tissue-related neoplastic diseases include, but are not limited to, lipoma, Adenolipomas, Angiolipoleiomyomas, Angiolipomas, Corpus callosum lipoma, Cerebellar pontine angle and internal auditory canal lipomas, Chondroid lipomas, Hibernomas, Intradermal spindle cell lipomas, Neural fibrolipomas, Pleomorphic lipomas, Spindle-cell lipomas, Superficial subcutaneous lipomas, Lipoblastoma, Liposarcoma.

[0157] Adipocyte lineage: As used herein, unless indicated otherwise or contradictory in context, the term “adipocyte cell lineage” refers to adipocyte cells at any stage of their development and thus include, but are not limited to, mesenchymal stem cells, areolar connective cells, adipocytes, pre-adipocytes/lipoblasts, and any precursor cells thereof.

[0158] Digestive system: The human digestive system is composed mainly of the gastrointestinal tract (including the esophagus, stomach, small intestine, large intestine, rectum and anus) and the accessory digestive glands (the liver, the gall bladder and the pancreas). To achieve the goal of providing energy and nutrients to the body, six major functions take place in the digestive system: ingestion, secretion, mixing and movement, digestion, absorption, excretion. The gastrointestinal wall refers to the specialized series of tissue layers surrounding the lumen of the gastrointestinal tract. The general structure involves the four following layers (ordered from the lumen outward): mucosa, submucosa, muscularis externa, serosa (if the tissue is intraperitoneal)/adventitia (if the tissue is retroperitoneal). Gastrointestinal cancer refers to malignant conditions of the gastrointestinal tract (GI tract) and accessory organs of digestion. The symptoms relate to the organ affected and can include obstruction (leading to difficulty swallowing or defecating), abnormal bleeding or other associated problems. Gastrointestinal tissue-related neoplastic diseases include, but are not limited to, Esophageal cancer, Stomach cancer, Pancreatic cancer, Liver cancer, Gallbladder cancer, MALT lymphoma, Gastrointestinal stromal tumors and Cancers of the biliary tree, including cholangiocarcinoma.

[0159] Gastrointestinal cell lineages: As used herein, unless indicated otherwise or contradictory in context, the term “gastrointestinal cell lineages” refers to gastrointestinal cells and cells of the digestive accessory organs at any stage of their development and thus include, but are not limited to interstitial cells of Cajal, gastrointestinal epithelial cells, parietal cells, acinar cells, chief cells, mucus cells, goblet cells, G cells, endocrine I cells, endocrine S cells, endocrine K cells, endocrine M cells, ECL (enterochromaffin) cells, D cells, enteroendocrine cells, APUD cells, hepatocytes, sinusoidal hepatic endothelial cells, Kupffer cells, hepatic stellate cells, centroacinar cells, pancreatic stellate cells, α-cells, γ-cells, β-cells, δ-cells, centroacinar cells, basophilic cells, ductal cells, columnar cells, cholecystocytes and any precursor cells thereof.

[0160] Lung: The lung is the essential respiration organ in many air-breathing animals. In mammals the two lungs are located near the backbone on either side of the heart. Their principal function is to transport oxygen from the atmosphere into the bloodstream, and to release carbon dioxide from the bloodstream into the atmosphere. A large surface area is needed for this exchange of gases, which is accomplished by the mosaic of specialized cells that form millions of tiny, exceptionally thin-walled air sacs called alveoli. Lung cells include, but are not limited to, type I pneumocytes, type II pneumocytes, clara cells and goblet cells. Lung tissue-related neoplastic diseases include, but are not limited to, lung cancer also known as carcinoma of the lung or pulmonary carcinoma, Epithelial cells or small-cell lung carcinoma (SCLC) and non-small-cell lung carcinoma (NSCLC).

[0161] Lung cell Lineages: As used herein, unless indicated otherwise or contradictory in context, the term “lung cell Lineage” refers to lung cells at any stage of their development and thus include, but are not limited to, epithelial cells, erythrocytes, alveolar cells and any precursor cells thereof.

[0162] Head and neck cancer: As used herein, unless indicated otherwise or contradictory in context, the term “head and neck cancer” refers to a group of cancers that usually starts in the lip, oral cavity, nasal cavity, paranasal sinuses, pharynx, and larynx. About 90% of head and neck cancers are squamous cell carcinomas. Thus, neoplastic diseases such as head and neck cancers include, but are not limited to, oral cancer, nasopharynx cancer, oropharyngeal cancer, hypopharynx cancer and laryngeal cancer.

[0163] The cell lineage involved in head and neck cancers includes all the cells involved in the formation of such cancers at any stage of their development and thus include, but are not limited to, cells of the oral cavity, cells of the pharynx, cells of the larynx, cells of the paranasal sinuses and nasal cavity, cells of the salivary glands and any precursor cells thereof.

[0164] Ratio: As used herein, unless indicated otherwise or contradictory in context, the term “ratio”, when used in relation to GFR-binding compound with respect to the adhesion protein inhibitor in the pharmaceutical association or composition disclosed herein, refers to the (molar, weight or part as specified) ratio between the quantity of GFR-binding compound and the quantity of adhesion protein inhibitor. The ratio may be a molar ratio, a weight ratio or a part ratio and will be specified as needed on a case by case basis. Quantity units may conventionally be mole, millimole, gram, milligram or parts. For example, in certain embodiments, it is convenient to express the relative quantity between GFR-binding compounds and adhesion protein inhibitors using densities. It shall be understood that this ratio may be varied according to the neoplastic cell type to be treated.

[0165] Density: As used herein, unless indicated otherwise or contradictory in context, the term “density”, when used in relation to GFR-binding compound with respect to the adhesion protein inhibitor in the pharmaceutical composition disclosed herein, refers to the quantity of GFR-binding compounds, expressed in e.g. mole, millimole, gram, or milligram, with respect to one standardised surface unit e.g. squared millimetre (mm²), squared micrometre (μm²), or squared nanometre (nm²)). For example, in certain embodiments, the ratio between a GFR-binding compound and an adhesion protein inhibitor in the pharmaceutical association or composition disclosed herein may be expressed in pmol per mm² or pmol/mm².

[0166] Cell cycle: As used herein, unless indicated otherwise or contradictory in context, the term “cell cycle” refers to the process through which a vertebrate cell self-replicate. In eukaryote cells, cell cycle consists of four discrete phases: G1, S, G2, and M. Together, the G1, S, and G2 phases make up the period known as interphase. During the S or “synthesis” phase, the cell replicates its DNA creating an exact copy of all of its chromosomes. In the M or “mitotic” phase, the cell division actually occurs and separates the chromosomes in its cell nucleus into two identical sets in two nuclei. The first phase within interphase, from the end of the previous M phase until the beginning of DNA synthesis, is called G1. During this phase the biosynthetic activities of the cell, which are considerably slowed down during M phase, resume at a high rate. This phase is marked by the formation of millions of proteins and later on enzymes that are required in S phase, mainly those needed for DNA replication. The G2 phase, or pre-mitotic phase, is the third and final sub-phase of Interphase in the cell cycle directly preceding Mitosis. It follows the successful completion of S phase and ends with the onset of prophase, the first phase of mitosis. In order to move from one phase of the cell cycle to the next, a cell must “validate” numerous checkpoints. At each checkpoint, specialized proteins determine whether the necessary conditions exist. If so, the cell is free to enter into the next phase. If not, progression through the cell cycle is halted. For example, in certain embodiments, during G1, the cell passes through a “validation” window punctuated by the restriction point R. During the “validation” phase, different checkpoints ensure that environmental conditions are favourable for replication. If conditions are not favourable, the cell may enter a resting state known as G0. The G0 phase or resting phase is a period in the cell cycle in which cells exist in a quiescent state. G0 phase is viewed as either an extended G1 phase, where the cell is neither dividing nor preparing to divide, or a distinct quiescent stage that occurs outside of the cell cycle. Typically, a healthy vertebrate cell undergoes cell division when needed e.g. to regenerate damaged tissues or simply replace old tissues by new ones, by switching from a G0 resting state into the G1 state of the cell cycle and resume cell division. In contrast, neoplastic cells (such as cancer cells) have lost their ability to suspend cell division and switch to the G0 phase therefore undergoing permanent cell division which is generally referred to uncontrolled cell division or proliferation. Another “validation” window takes place later in the cell cycle, just before a cell moves from G2 to mitosis. Here, a number of proteins scrutinize the cell's DNA ensuring proper replication has taken place. Finally, another cell cycle “validation” window takes place during mitosis in which different checkpoints determines whether chromosomes are correctly attached to the spindle, and to the network of microtubules that will separate them during cell division.

[0167] Quiescence: As used herein, unless indicated otherwise or contradictory in context, the term “quiescence”, when used in relation to a cell, refers to a resting state during which the cell does not divide, duplicate or proliferate. This state is also called the G0 state. As used herein, “inducing quiescence of a neoplastic cell” thus means to provoke the passage from G1 to G0 of a neoplastic cell which usually has lost the ability to do so. One method to detect the passage from G1 to G0 is, for instance, to monitor the state of phosphorylation of the protein Rb via Western Blot. The Rb protein is normally not phosphorylated during the G0 phase but becomes phosphorylated or even hyper-phosphorylated during the rest of the cell cycle. Consequently, observing the absence (or substantial reduction i.e. at least 90% reduction, in comparison with the quantity present in the G1 phase) of phosphorylated Rb protein on a western blot confirms that a neoplastic cell has undergone (at some point in time) a switch to the G0 phase.

[0168] Cell division or cell proliferation: As used herein, unless indicated otherwise or contradictory in context, the term “cell division” or “cell proliferation”, refers to the process by which a cell self-replicate, replicate or is caused to replicate.

[0169] Proliferate: As used herein, unless indicated otherwise or contradictory in context, the term “proliferate” means to grow, expand or increase or cause to grow, expand or increase. “Proliferative” means having the ability to proliferate. “Anti-proliferative” means having properties to counter, reduce, or inhibit proliferation.

[0170] Hyperproliferation: As used herein, unless indicated otherwise or contradictory in context, the term “hyperproliferation” or “uncontrolled proliferation” means the abnormal growth, expansion or increase or causing the abnormal growth, expansion or increase. Abnormal growth typically originates from the abnormal regulation of the cell cycle preventing the cell to reach the G0 state and stop cell division and replication. One consequence of hyper or uncontrolled proliferation is the development of neoplastic diseases such as tumours and cancers.

[0171] Hyperproliferative diseases: As used herein, unless indicated otherwise or contradictory in context, the term “hyperproliferative diseases” is used interchangeably with “neoplastic diseases” and refers to diseases that are characterized by uncontrolled cellular proliferation and/or disruption in programmed cell death. The loss of a cell's ability to control cellular proliferation is often caused by genetic damage to the cellular pathways responsible for regulating cellular functions, including but not limited to, for example, in certain embodiments, metabolism, cell cycle progression, cell adhesion, vascular function, apoptosis, and angiogenesis.

[0172] Anti-mitogen activity: As used herein, unless indicated otherwise or contradictory in context, the term “anti-mitogen activity”, refers to biological pathways that down-regulate, partially inhibit or suppress cell mitosis i.e. cell division. As used herein, a substance or pharmaceutical association which promotes, induces or favours anti-mitogen activity thus means a substance or pharmaceutical association which provides at least part of its effective biologic or therapeutic action by down-regulating, partially inhibiting or suppressing mitosis of the neoplastic cell to be treated.

[0173] Tumor suppressor pathways: As used herein, unless indicated otherwise or contradictory in context, the term “tumor suppressor pathways” refers to biological pathways that down-regulate, partially inhibit or suppress tumor activity i.e. protect the cell against cell defects which could cause tumors or cancers. As used herein, a substance or pharmaceutical association which promotes, induces or favours tumor suppressor pathways thus means a substance or pharmaceutical association which provides at least part of its effective biologic or therapeutic action by up-regulating, activating or promoting the tumor suppressor genes or proteins of the neoplastic cell to be treated. Known tumor suppressor proteins which have a dampening or repressive effect on the regulation of the cell cycle or promote apoptosis include, but are not limited to, p53, pRb, pVHL, APC, CD95, ST5, YPEL3, ST7, and ST14.

[0174] Anti-oncogenic activity: As used herein, unless indicated otherwise or contradictory in context, the term “anti-oncogenic activity” refers to any molecule having the ability to inhibit, repress or down-regulate the gene or protein expression of oncogenes. An oncogene is a gene that has the potential to cause neoplastic diseases such as cancer. Examples of anti-oncogene molecules include tumor suppressor proteins.

[0175] By “without temporarily or permanently damaging or killing a neoplastic cell”, is meant, unless indicated otherwise or contradictory in context, that a neoplastic disease, such as cancer, is treated without inducing the entry of the neoplastic cells into apoptosis as it may be assessed by the positive expression of proteins caspase 3, 6 and 7.

[0176] By “without permanently inducing a quiescent state in a neoplastic cell”, is meant, unless indicated otherwise or contradictory in context, that a neoplastic disease, such as cancer, is treated by inducing a temporary quiescent state in the neoplastic cells (the cells enter the G0 phase) and then differentiate into a more specialised state.

[0177] Non-mutagenic: As used herein, unless indicated otherwise or contradictory in context, the term “non-mutagenic”, when used in relation to a therapy or treatment, refers to a therapy which does not involve the alteration or modification of a cell's genome.

[0178] Recoding: As used herein, unless indicated otherwise or contradictory in context, the term “recoding” or “converting”, when used in relation to a cell (in particular a neoplastic cell such as a cancer cell), refers to the action of providing, to a neoplastic cell to be treated, a suitable extracellular micro-environment (e.g. in the form of a pharmaceutical association or composition as defined herein) providing appropriate extracellular signals so that the cell may undergo self-recovery or -healing and be converted into a partially or fully differentiated non-neoplastic cell.

[0179] Recoding therapy: As used herein, unless indicated otherwise or contradictory in context, the term “recoding therapy” refers to a therapy that promotes and stimulates the cell's natural abilities to redirect its own fate by integrating accurate micro-environmental recoding signals.

[0180] Extracellular micro-environment: As used herein, unless indicated otherwise or contradictory in context, the term “extracellular micro-environment” refers to the environment surrounding (in functional proximity with) a specific cell which is characterized by biophysical, mechanical and biochemical properties specific for each tissue and is able to regulate cell behavior. Modification of the extracellular micro-environment of a neoplastic cell using, for instance, pharmaceutical associations or compositions as defined herein allows for the conversion or recoding of said neoplastic cell into a healthy, functional, non-neoplastic cell.

[0181] Self-recovery or self-healing: As used herein, unless indicated otherwise or contradictory in context, the term “self-recovery” or “self-healing”, when used in relation to a neoplastic cell such as a cancer cell, means that the neoplastic cell operates its own internal biological changes once it has been recoded or treated using a pharmaceutical association or composition as defined herein, so that it becomes a functional, healthy, non-neoplastic cell. The cell heal itself when in contact with the pharmaceutical composition or association as defined herein and, in contrast with previously reported methods wherein the neoplastic cell is forced to die or maintained in a temporarily reduced or non-proliferative state.

[0182] Physiologically functional cell: As used herein, unless indicated otherwise or contradictory in context, the term “physiologically functional cell” refers to a cell which is able to perform normally all of the cell functions associated with a particular cell type and necessary for the normal physiology of a cell. These functions include all of the intracellular molecular mechanisms but also all of the activities necessary for a normal communication between the cell and its microenvironment. One method which may be used to verify if a cell is physiologically functional is the grafting of the cell, after the introduction of fluorescent markers, in other mammalian model organisms such as mouse models. The cell is grafted in the tissue corresponding to its cell type. The cell characteristics and normal functions are monitored after a period of time with various methods such as in vivo microscopy or histological staining. The term “functional” when used in relation to a molecule, compound or substance refers to a biological molecule in a form in which it exhibits a property and/or activity by which it is characterized.

[0183] Healthy cell: As used herein, unless indicated otherwise or contradictory in context, the term “healthy cell” refers to a cell which presents a normal morphology, normal cell functions and normal cell growth which are not damaged, altered or inactivated by a neoplastic disease.

[0184] Shorter period of time: As used herein, unless indicated otherwise or contradictory in context, the term “shorter period of time”, when used in relation to conversion or recoding duration, means substantially shorter to provide a substantial benefit for the treated patient in comparison with existing treatments. In certain embodiments, a shorter period of time includes at least 1.5-fold, at least 2-fold, at least 2.5-fold, at least 3-fold, at least 3.5-fold, at least 4-fold, at least 4.5-fold, at least 5-fold, at least 6-fold, at least 7-fold, at least 8-fold, at least 9-fold or at least 10-fold reduction with respect to an existing treatment.

[0185] Exogenous: As used herein, unless indicated otherwise or contradictory in context, the term “exogenous” refers to a substance coming from outside a living system such as a cell, an organ, or an individual organism. For example, in certain embodiments, exogenous factors in medicine include pathogens and therapeutics. DNA introduced into a cell via transfection or viral infection may be considered as an exogenous factor. Carcinogens are also commonly referred to as exogenous factors.

[0186] Endogenous: As used herein, unless indicated otherwise or contradictory in context, the term “endogenous” refers to substances that originate from within an organism, tissue, or cell.

[0187] Intracellular: As used herein, unless indicated otherwise or contradictory in context, the term “intracellular” generally means “inside the cell”. In vertebrates, such as animals, the cell membrane is the barrier between the inside of the cell and the outside of the cell (the extracellular milieu). Thus, treatments and therapies in which at least one substance, compound, pharmaceutical association, combination or composition penetrates the cell wall of a cell to be treated in order to produce/deliver its (effective) biological effect are considered as intracellular treatments and therapies.

[0188] Extracellular: As used herein, unless indicated otherwise or contradictory in context, the term “extracellular” means “outside the cell”. In vertebrates, such as animals, the cell membrane is the barrier between the inside of the cell (the intracellular milieu) and the outside of the cell. Thus, treatments and therapies in which no substance, compound, pharmaceutical association, combination or composition requires penetration of the cell wall in order to produce/deliver its (effective) biological effect (e.g. by interacting with trans-membrane receptors) are considered as extracellular treatments and therapies. However, a therapy using a plurality of substances in order to provide the desired biological effect wherein one or more of these substances require the entry into the intracellular compartment to provide (or deliver) its biological effect is still considered as an extracellular therapy in the sense of the present disclosure insofar as at least one of these substances provide (or deliver) its biological effect without entering the intracellular compartment. In one example, a therapy involving the extracellular action of a GFR-binding compound and the intracellular action of an adhesion protein inhibitor (e.g. via gene silencing using si-RNAs or transcription inhibition using micro-RNAs) would still be considered as an extracellular therapy for the purpose of the present disclosure.

[0189] Cytostatic: As used herein, unless indicated otherwise or contradictory in context, the term “cytostatic” refers to inhibiting, reducing, or suppressing the growth, division, or multiplication of a cell (e.g., a mammalian cell (e.g., a human cell)), bacterium, virus, fungus, protozoan, parasite, prion, or a combination thereof.

[0190] Cytotoxic: As used herein, unless indicated otherwise or contradictory in context, the term “cytotoxic” refers to killing or causing injurious, toxic, or deadly effect on a cell (e.g., a mammalian cell (e.g., a human cell)), bacterium, virus, fungus, protozoan, parasite, prion, or a combination thereof.

[0191] In vitro: As used herein, unless indicated otherwise or contradictory in context, the term “in vitro” refers to events that occur in an artificial environment, e.g., in a test tube or reaction vessel, in cell culture, in a Petri dish, etc., rather than within an organism (e.g., animal, plant, or microbe).

[0192] In vivo: As used herein, unless indicated otherwise or contradictory in context, the term “in vivo” refers to events that occur within an organism (e.g., animal, plant, or microbe or cell or tissue thereof).

[0193] Ex vivo: As used herein, unless indicated otherwise or contradictory in context, the term “ex vivo” refers to events that occur in an external environment on tissues sourced from an organism (e.g., animal, plant, or microbe) in an attempt to replicate natural living conditions outside such an organism.

[0194] Syndecans: As used herein, unless indicated otherwise or contradictory in context, the term “syndecans” refers to single transmembrane domain proteins that are thought to act as co-receptors, especially for G protein-coupled receptors. These core proteins carry three to five heparan sulfate and chondroitin sulfate chains, which allow for interaction with a large variety of ligands including fibroblast growth factors, vascular endothelial growth factor, transforming growth factor-beta, fibronectin and antithrombin-1. Interactions between fibronectin and some syndecans can be modulated by the extracellular matrix protein tenascin C. The syndecan protein family has four members. Syndecans 1 and 3 and syndecans 2 and 4, making up separate subfamilies, arose by gene duplication and divergent evolution from a single ancestral gene. The syndecan numbers reflect the order in which the cDNAs for each family member were cloned. All syndecans have an N-terminal signal peptide, an ectodomain, a single hydrophobic transmembrane domain, and a short C-terminal cytoplasmic domain. All syndecans are anchored to plasma membrane via a 24-25 amino acid long hydrophobic transmembrane domain. In mammalian cells, syndecans are expressed by unique genes located on different chromosomes. All members of the syndecan family have 5 exons. The difference in size of the syndecans is credited to the variable length of exon 3, which encodes a spacer domain. In humans, the amino acid length of syndecan 1, 2, 3 and 4 is 310, 201, 346 and 198 respectively. Glycosaminoglycan chains, a member of the heparan sulfate group, are an important component of syndecans and are responsible for a diverse set of syndecan functions. The addition of glycosaminoglycans to syndecan is controlled by a series of post-translational events.

[0195] Cyclin-dependent kinases: As used herein, unless indicated otherwise or contradictory in context, the term “Cyclin-dependent kinases” or “CDKs” refers to a family of protein involved in the regulation of the cell cycle. They are present in all known eukaryotes, and their regulatory function in the cell cycle has been evolutionarily conserved. By definition, a CDK binds a regulatory protein called a cyclin. It is reported that, without cyclin, CDK has little kinase activity; only the cyclin-CDK complex is considered to be an active kinase. CDKs phosphorylate their substrates on serines and threonines, so they can be said to belong to the serine-threonine kinase family. CDKs and cyclins are thus highly conserved across species and are present in all cell types including those having a neoplastic phenotype (e.g. cancer cells). Most of the known cyclin-CDK complexes regulate the progression through the cell cycle. Animal cells contain at least nine CDKs, four of which, CDK 1, 2, 3, 4 and 6, are reported to be directly involved in cell cycle regulation: CDK1 regulated by cyclin A, cyclin B; CDK2 regulated by cyclin A, cyclin E; CDK3 regulated by cyclin C; CDK4 regulated by cyclin D1, cyclin D2, cyclin D3; CDK5 regulated by CDK5R1, CDK5R2; CDK6 regulated by cyclin D1, cyclin D2, cyclin D3; CDK7 regulated by cyclin H; CDK8 regulated by cyclin C; CDK9 regulated by cyclin T1, cyclin T2a, cyclin T2b, cyclin K.

[0196] Cyclins: As used herein, unless indicated otherwise or contradictory in context, the term “cyclins” refers to a family of proteins that control the progression of cells through the cell cycle by activating cyclin-dependent kinase (CDK) enzymes. Cyclin D is one of the major cyclins produced in terms of its functional importance. It is known to interact with four CDKs: CDK2, 4, 5, and 6. In proliferating cells, cyclin D-CDK4/6 complex accumulation is of great importance for cell cycle progression. For instance, cyclin D-CDK4/6 complexes partially phosphorylates retinoblastoma tumor suppressor protein (Rb), whose inhibition can induce expression of some genes important for S phase progression.

[0197] Patient/subject: As used herein, unless indicated otherwise or contradictory in context, the term “patient” or “subject”, which are used interchangeably, refers to any organism to which a composition in accordance with the invention may be administered, e.g., for experimental, diagnostic, prophylactic, and/or therapeutic purposes. Typical subjects include animals (e.g., mammals such as mice, rats, rabbits, non-human primates, and humans) and/or plants. As used herein, patients/subjects include those individuals who may seek or be in need of treatment, requires treatment, is receiving treatment, will receive treatment, or a subject who is under care by a trained professional for a particular disease or condition.

[0198] Purified: As used herein, unless indicated otherwise or contradictory in context, the term “purify,” “purified,” “purification” means to make substantially pure or clear from unwanted components, material defilement, admixture or imperfection.

[0199] Targeted Cells: As used herein, unless indicated otherwise or contradictory in context, the term “targeted cells” refers to any one or more cells of interest. The cells may be found in vitro, in vivo, in situ or in the tissue or organ of an organism. The organism may be an animal, preferably a mammal, more preferably a human and most preferably a patient.

[0200] Molecule length: As used herein, unless indicated otherwise or contradictory in context, the term molecule or peptide “length” or “size” means the longest 2D or 3D distance which may possibly be measured within the molecule. For cyclic molecules, “length” or “size” means the longest measurable distance across the cyclic structure. Throughout the present disclosure, when a molecule size or length is given (in general using the nanometre, nm, unit), the following procedures were used to calculate them:
[0201] The so-called «2D» procedure: a 2D chemical structure was drawn in e.g. the ChemDraw® Software. Then, size measurement was carried out via the available ChemDraw length measurement tools. The length value given herein corresponds to the longest 2D length of the molecule using the default settings 2D bond sizes and angles of the software.
[0202] Alternatively, the so-called “3D” procedure may be followed:
[0203] (1) Drawing of the chemical structure of the molecule using suitable softwares (such as ChemDraw).
[0204] (2) Creating a 3D structure model of the molecule hereby drawn using SCWRL (Protein Sci. 2003; 12(9):2001-14) or MODELLER (Current Protocols in Bioinformatics. 15:5.6:5.6.1-5.6.30), each of which is hereby incorporated by reference in its entirety.
[0205] (3) Incubating the obtained 3D structure model in a box simulation containing water for few milliseconds using AMBER (J. Computat. Chem. 2005; 26, 1668-1688), which is hereby incorporated by reference in its entirety.
[0206] (4) Measuring the size of the molecule hereby obtained using softwares such as Pymol® using available Pymol length measurement tools (DeLano Scientific LLC, http://www.pymol.org).

[0207] Root Mean Square Deviation: As used herein, unless indicated otherwise or contradictory in context, the term “Root Mean Square Deviation” or “RMSD” is well known in the art and means the square root of the arithmetic mean of the square of the distances between certain matched atoms. One can represent a molecular conformation as a vector whose components are the Cartesian coordinates of the molecule's atoms. Therefore, a conformation for a molecule with N atoms can be represented as a 3N-dimensional vector of real numbers. To calculate the RMSD of a pair of peptides or peptidomimetics (e.g. x and y), each one of them must be represented as a 3N-length (assuming N atoms) vector of coordinates. The RMSD is therefore the square root of the arithmetic mean of the square of the distances between corresponding atoms of x and y. It is a measure of the average atomic displacement between the conformations of the two structures:

$$\sqrt{\frac{1}{N} {\sum }_{i = 1}^{N} \vert xi - yi \vert {1}^{2}}$$

[0208] In other words, the RMSD is the measure of the average distance between the atoms (usually the backbone atoms) of superimposed polypeptides or peptidomimetics. In the study of globular protein conformations, one customarily measures the similarity in three-dimensional structure by the RMSD of the Cα atomic coordinates after optimal rigid body superposition.

[0209] The RMSD value of a given peptide or peptidomimetic with respect to a specifically selected reference structure (hereinafter may also be referred to as “PEPREF”) may be calculated using various methods all well know by the skilled person. However, for the purpose of the present disclosure and for the avoidance of doubts, the RMSD of a given peptide or peptidomimetic as used in the present disclosure is obtained precisely using the following procedure:

[0210] STEP 1: Creating a 3-dimensional model of (i.e. obtaining 3D structure coordinates for) a peptide or peptidomimetic for which the RMSD is to be calculated, by:

[0211] STEP 1.1: Obtaining a set of polypeptide 3D structure coordinates based on the alignment with the sequence of a peptide or peptidomometic for which the RMSD value is to be calculated, using the BLAST algorithm according to the following procedure:
[0212] 1. Open the following link to access the “Standard Protein Blast” tool: http://blast.ncbi.nlm.nih.gov/Blast.cgi?PROGRAM=blastp&PAGE_TYPE=BlastSearch&LINK_LOC=blasthome
[0213] 2. Enter the amino acid sequence of the peptide or peptidomimetic of interest in the “Enter Query Sequence” section. The alignment is performed one sequence after the other (this is not a multiple alignment tool).
[0214] 3. In the section “Choose Search Set”, choose the following database: Protein Data Bank Proteins (pdb).
[0215] 4. In the section “Choose Search Set”, do not exclude «Models (XM/XP)» and do not Exclude «Uncultured/environmental sample sequences».
[0216] 5. In the section “Program Selection”, choose the following algorithm: blastp (protein-protein BLAST)
[0217] 6. Leave other fields as shown on the screenshot in FIG. 20.
[0218] 7. Run BLAST.
[0219] 8. The results obtained from the query are presented in the form of several pdb files.
[0220] 9. From this output results, the first ten (10) PDB files corresponding to the best sequence alignments are retained. This set of 10 PDB files or structures will be used in the next step (Step 2: structural alignments with STAMP).
[0221] 10. Finally, clean up the 10 structures contained in the 10 PDB files by removing all e.g. additional small molecules, receptors or portions thereof, dimers or portions thereof, so as to retain only the polypeptide chain of interest.

[0222] The set of pdf files contains the polypeptide 3D structure coordinates of the 10 structures having the highest sequence homology with the peptide or peptidomometic for which the RMSD value is to be calculated.

[0223] STEP 1.2: Performing the structural alignment of the set of 3D structure coordinates obtained in STEP 1.1, thereby obtaining a set of aligned polypeptide 3D structure coordinates, by using STAMP (Structural Alignment of Multiple Proteins Version 4.2) according to the following procedure:
[0224] 1. Open the following link to access the “STAMP superposition” tool: http://www.russelllab.org/cgi-bin/pdc/stamp.pl
[0225] 2. In the section entitled “Structure A”, input the PDB file corresponding to the first structure from the set of ten 3D structure coordinates obtained in STEP 1.1, which corresponds to the best sequence alignment with BLAST.
[0226] 3. In the section entitled “Structure B”, input the PDB file corresponding to the second structure from the set of ten 3D structure coordinates obtained in STEP 1.1, which corresponds to the second best sequence alignment with BLAST.
[0227] 4. Run STAMP.
[0228] 5. Repeat steps 2 to 4 with the other eight pdb files from the set of ten 3D structure coordinates identified in STEP 1.1 by successively entering the PDB files in the field “Structure B”.
[0229] 6. As a result, the structural alignment of the 10 structures contained in the set of PDB files obtained in STEP 1.1 is obtained in the form of 9 distinct PDB files each containing a pair of aligned polypeptide 3D structure (structure 1 with structure 2, structure 1 with structure 3, structure 1 with structure 4, . . . , structure 1 with structure 10).
[0230] 7. From these 9 “pair” PDB files, 10 PDB files each containing one of structures 1 to 10 are created.
[0231] 8. 10 PDB files containing the aligned 3D structure coordinates are thus obtained from STEP 1.2. for use in the next step.

[0232] STEP 1.3: Modelling the sequence of peptide or peptidomometic for which the RMSD value is to be calculated against the set of aligned polypeptide 3D structure coordinates obtained in STEP 1.2, thereby obtaining a set of 3D structure coordinates for the peptide or peptidomometic for which the RMSD value is to be calculated, using SCWRL (reference: “SCWRL and MolIDE: computer programs for side-chain conformation prediction and homology modeling”, Nature Protocols VOL. 3 NO. 12 2008, Qiang Wang et al.; which is hereby incorporated by reference in its entirety) according to the following procedure:
[0233] 1. Insert the input sequence of a peptide or peptidomometic for which the RMSD value is to be calculated in Fasta format.
[0234] 2. Import the first PDB file containing the aligned polypeptide 3D structure coordinates obtained in STEP 1.2.
[0235] 3. Run SCWRL by typing the following command for Unix based systems: “scwrl_path/scwrl3 -i inputpdbfile -o outputpdbfile -s sequencefile 4 logfile”.
[0236] 4. As a result, a first PBD file is obtained containing the predicted 3D structure coordinates of the peptide or peptidomometic for which the RMSD value is to be calculated.
[0237] 5. Repeat steps 1 to 3 using the 9 remaining PDB files obtained in STEP 1.2.
[0238] 6. 10 PDB files are obtained from STEP 1.3 for use in the following STEP 1.4.

[0239] STEP 1.4: Minimizing the free energy (ΔG) of the set of 3D structure coordinates for the peptide or peptidomometic for which the RMSD value is to be calculated obtained in STEP 1.3 using GROMACS (Reference: Hess B, Kutzner C, Van Der Spoel D, Lindahl E (2008). “GROMACS 4: Algorithms for Highly Efficient, Load-Balanced, and Scalable Molecular Simulation”. J Chem Theory Comput 4 (2): 435; which is hereby incorporated by reference in its entirety) according to the following procedure:
[0240] 1. Create a Gromacs topology (gmx) file from the first PDB file of the modeled peptide or peptidomometic for which the RMSD value is to be calculated obtained in STEP 1.3, by using the command «pdb2gmx -f NOMDUFICHIERPDB.pdb -water spc». “NOMDUFICHIERPDB” is the name of the input PDB file.
[0241] 2. Create a box around the imported modeled peptide or peptidomometic by using the command «editconf -f conf.gro -bt cubic d 0.7 o box.gro».
[0242] 3. Add solvent (water) molecules into the box by using the command «genbox -cp box.gro -cs spc216.gro -p topol.top -o solvated.gro».
[0243] 4. Prepare the input for the molecular dynamics (MD) run with the command «vim em.mdp». Default run is set to 1000 nsteps.
[0244] 5. Create an input for the MD run by using the command «grompp -f em.mdp -p topol.top -c solvated.gro -o em.tpr».
[0245] 6. Run the command «mdrun -v -deffnm em» to perform the actual energy minimization.
[0246] 7. Run the command «g energy -f em.edr -s em.tpr -o em.xvg» and then run option «7».
[0247] 8. As a result, a first XMG file is obtained. To view the XMG file run the command «xmgrace em.xvg».
[0248] 9. Repeat steps 1 to 8 with the 9 remaining structures obtained in STEP 1.3. 10 XMG files are thus obtained.
[0249] 10. The structure of lowest energy is obtained from each XMG file in the form of a PDB file. 10 PDB files each containing one structure of lowest energy are thus obtained from STEP 1.4 for use in the next step.

[0250] STEP 2: Calculating the RMSD of the peptide or peptidomimetic for which the RMSD value is to be calculated by comparing the 3D structure coordinates of the peptide or peptidomimetic obtained in STEP 1.4 with the 3D structure coordinates of PEPREF to obtain the lowest possible RMSD value using FATCAT (Flexible structure AlignmenT by Chaining Aligned fragment pairs allowing Twists) according to the following procedure:
[0251] 1. Open the following link to access the “FATCAT” software: http://fatcat.burnham.org
[0252] 2. Open the “pairwise alignment” tool.
[0253] 3. Import the PDB file containing the structure coordinates of PEPREF in the “Get the 1st structure” section.
[0254] 4. Import the first PDB file of the peptide or peptidomimetic for which the RMSD value is to be calculated with minimized energy obtained in STEP 1.4.
[0255] 5. Run FATCAT.
[0256] 6. As a result, a first RMSD value of the first structure of the peptide or peptidomimetic for which the RMSD value is to be calculated as obtained in STEP 1.4 will be obtained in the output report.
[0257] 7. Repeat steps 1 to 5 with the 9 remaining structures (PDB files) obtained from STEP 1.4.
[0258] 8. The peptide or peptidomimetic structure with the lowest RMSD (out of the ten RMSD values successively obtained) is the value taken into account in the present application.

[0259] 3D structure coordinates of PEPREF: As used herein, unless indicated otherwise or contradictory in context, the 3D structure coordinates of PEPREF are as follows:

| | | | | | | | | |
|---|---|---|---|---|---|---|---|---|
| ATOM | 511 | N | LYS | A | 1 | −14.570 | 46.437 | 27.424 |
| ATOM | 512 | CA | LYS | A | 1 | −13.512 | 45.748 | 28.151 |
| ATOM | 513 | C | LYS | A | 1 | −13.655 | 44.259 | 27.884 |
| ATOM | 514 | O | LYS | A | 1 | −12.769 | 43.463 | 28.197 |
| ATOM | 515 | CB | LYS | A | 1 | −13.605 | 46.029 | 29.652 |
| ATOM | 516 | CG | LYS | A | 1 | −13.640 | 47.509 | 29.991 |
| ATOM | 517 | CD | LYS | A | 1 | −12.615 | 48.297 | 29.183 |
| ATOM | 518 | CE | LYS | A | 1 | −12.625 | 49.768 | 29.575 |
| ATOM | 519 | NZ | LYS | A | 1 | −13.994 | 50.369 | 29.497 |
| ATOM | 520 | N | ILE | A | 2 | −14.792 | 43.890 | 27.309 |
| ATOM | 521 | CA | ILE | A | 2 | −15.051 | 42.499 | 26.967 |
| ATOM | 522 | C | ILE | A | 2 | −14.911 | 42.370 | 25.444 |
| ATOM | 523 | O | ILE | A | 2 | −15.531 | 43.125 | 24.683 |
| ATOM | 524 | CB | ILE | A | 2 | −16.466 | 42.065 | 27.401 |
| ATOM | 525 | CG1 | ILE | A | 2 | −16.630 | 42.238 | 28.915 |
| ATOM | 526 | CG2 | ILE | A | 2 | −16.710 | 40.629 | 26.985 |
| ATOM | 527 | CD1 | ILE | A | 2 | −15.631 | 41.478 | 29.30 |
| ATOM | 528 | N | PRO | A | 3 | −14.085 | 41.411 | 24.989 |
| ATOM | 529 | CA | PRO | A | 3 | −13.789 | 41.109 | 23.588 |
| ATOM | 530 | C | PRO | A | 3 | −14.998 | 40.695 | 22.768 |
| ATOM | 531 | O | PRO | A | 3 | −15.969 | 40.164 | 23.305 |
| ATOM | 532 | CB | PRO | A | 3 | −12.785 | 39.968 | 23.688 |
| ATOM | 533 | CG | PRO | A | 3 | −12.156 | 40.166 | 25.007 |
| ATOM | 534 | CD | PRO | A | 3 | −13.330 | 40.506 | 25.867 |
| ATOM | 535 | N | LYS | A | 4 | −14.937 | 40.937 | 21.463 |
| ATOM | 536 | CA | LYS | A | 4 | −16.023 | 40.529 | 20.590 |
| ATOM | 537 | C | LYS | A | 4 | −15.886 | 39.015 | 20.391 |
| ATOM | 538 | O | LYS | A | 4 | −14.903 | 38.415 | 20.831 |
| ATOM | 539 | CB | LYS | A | 4 | −15.926 | 41.244 | 19.245 |
| ATOM | 540 | CG | LYS | A | 4 | −15.802 | 42.751 | 19.355 |
| ATOM | 541 | CD | LYS | A | 4 | −16.292 | 43.433 | 18.083 |
| ATOM | 542 | CE | LYS | A | 4 | −16.162 | 44.943 | 18.177 |
| ATOM | 543 | NZ | LYS | A | 4 | −16.825 | 45.628 | 17.019 |
| ATOM | 544 | N | ALA | A | 5 | −16.85 | 38.393 | 19.759 |
| ATOM | 545 | CA | ALA | A | 5 | −16.811 | 36.955 | 19.507 |
| ATOM | 546 | C | ALA | A | 5 | −15.772 | 36.771 | 18.416 |
| ATOM | 547 | O | ALA | A | 5 | −15.727 | 37.534 | 17.455 |
| ATOM | 548 | CB | ALA | A | 5 | −18.168 | 36.419 | 19.043 |
| ATOM | 549 | N | CYS | A | 6 | −14.935 | 35.756 | 18.562 |
| ATOM | 550 | CA | CYS | A | 6 | −13.887 | 35.518 | 17.584 |
| ATOM | 551 | C | CYS | A | 6 | −14.347 | 34.765 | 16.338 |
| ATOM | 552 | O | CYS | A | 6 | −15.327 | 34.018 | 16.368 |
| ATOM | 553 | CB | CYS | A | 6 | −12.743 | 34.768 | 18.241 |
| ATOM | 554 | SG | CYS | A | 6 | −11.198 | 34.959 | 17.353 |
| ATOM | 555 | N | CYS | A | 7 | −13.623 | 34.973 | 15.243 |
| ATOM | 556 | CA | CYS | A | 7 | −13.931 | 34.328 | 13.969 |
| ATOM | 557 | C | CYS | A | 7 | −13.091 | 33.071 | 13.798 |
| ATOM | 558 | O | CYS | A | 7 | −11.961 | 33.123 | 13.302 |
| ATOM | 559 | CB | CYS | A | 7 | −13.653 | 35.290 | 12.824 |
| ATOM | 560 | SG | CYS | A | 7 | −13.930 | 34.633 | 11.154 |
| ATOM | 561 | N | VAL | A | 8 | −13.654 | 31.941 | 14.209 |
| ATOM | 562 | CA | VAL | A | 8 | −12.949 | 30.684 | 14.110 |
| ATOM | 563 | C | VAL | A | 8 | −13.653 | 29.733 | 13.157 |
| ATOM | 564 | O | VAL | A | 8 | −14.759 | 30.016 | 12.687 |
| ATOM | 565 | CB | VAL | A | 8 | −12.814 | 30.038 | 15.492 |
| ATOM | 566 | CG1 | VAL | A | 8 | −11.807 | 30.825 | 16.337 |
| ATOM | 567 | CG2 | VAL | A | 8 | −14.161 | 30.006 | 16.170 |
| ATOM | 568 | N | PRO | A | 9 | −13.003 | 28.601 | 12.828 |
| ATOM | 569 | CA | PRO | A | 9 | −13.593 | 27.615 | 11.918 |
| ATOM | 570 | C | PRO | A | 9 | −14.726 | 26.886 | 12.631 |
| ATOM | 571 | O | PRO | A | 9 | −14.581 | 26.476 | 13.780 |
| ATOM | 572 | CB | PRO | A | 9 | −12.423 | 26.676 | 11.601 |
| ATOM | 573 | CG | PRO | A | 9 | −11.204 | 27.487 | 11.925 |
| ATOM | 574 | CD | PRO | A | 9 | −11.620 | 28.226 | 13.163 |
| ATOM | 575 | N | THR | A | 10 | −15.847 | 26.721 | 11.942 |
| ATOM | 576 | CA | THR | A | 10 | −16.999 | 26.060 | 12.527 |
| ATOM | 577 | C | THR | A | 10 | −17.334 | 24.767 | 11.804 |
| ATOM | 578 | O | THR | A | 10 | −18.097 | 23.943 | 12.303 |
| ATOM | 579 | CB | THR | A | 10 | −18.211 | 27.010 | 12.523 |
| ATOM | 580 | OG1 | THR | A | 10 | −18.491 | 27.445 | 11.185 |
| ATOM | 581 | CG2 | THR | A | 10 | −17.902 | 28.230 | 13.375 |
| ATOM | 582 | N | GLU | A | 11 | −16.750 | 24.586 | 10.627 |
| ATOM | 583 | CA | GLU | A | 11 | −16.980 | 23.377 | 9.848 |
| ATOM | 584 | C | GLU | A | 11 | −15.643 | 22.935 | 9.246 |
| ATOM | 585 | O | GLU | A | 11 | −15.029 | 23.666 | 8.464 |
| ATOM | 586 | CB | GLU | A | 11 | −17.981 | 23.624 | 8.715 |
| ATOM | 587 | CG | GLU | A | 11 | −19.421 | 23.807 | 9.163 |
| ATOM | 588 | CD | GLU | A | 11 | −19.686 | 25.166 | 9.770 |
| ATOM | 589 | OE1 | GLU | A | 11 | −19.478 | 26.175 | 9.073 |
| ATOM | 590 | OE2 | GLU | A | 11 | −20.111 | 25.227 | 10.939 |
| ATOM | 591 | N | LEU | A | 12 | −15.183 | 21.749 | 9.622 |
| ATOM | 592 | CA | LEU | A | 12 | −13.923 | 21.254 | 9.104 |
| ATOM | 593 | C | LEU | A | 12 | −14.062 | 19.912 | 8.386 |
| ATOM | 594 | O | LEU | A | 12 | −15.136 | 19.299 | 8.359 |
| ATOM | 595 | CB | LEU | A | 12 | −12.893 | 21.144 | 10.230 |
| ATOM | 596 | CG | LEU | A | 12 | −12.660 | 22.422 | 11.054 |
| ATOM | 597 | CD1 | LEU | A | 12 | −13.475 | 22.350 | 12.337 |
| ATOM | 598 | CD2 | LEU | A | 12 | −11.181 | 22.586 | 11.399 |
| ATOM | 599 | N | SER | A | 13 | −12.971 | 19.476 | 7.771 |
| ATOM | 600 | CA | SER | A | 13 | −12.964 | 18.218 | 7.046 |
| ATOM | 601 | C | SER | A | 13 | −11.568 | 17.628 | 7.164 |
| ATOM | 602 | O | SER | A | 13 | −10.613 | 18.320 | 7.550 |
| ATOM | 603 | CB | SER | A | 13 | −13.346 | 18.435 | 5.578 |
| ATOM | 604 | OG | SER | A | 13 | −12.404 | 19.261 | 4.923 |
| ATOM | 605 | N | ALA | A | 13 | −11.449 | 16.352 | 6.818 |
| ATOM | 606 | CA | ALA | A | 13 | −10.179 | 15.665 | 6.949 |
| ATOM | 607 | C | ALA | A | 13 | −9.421 | 15.471 | 5.652 |
| ATOM | 608 | O | ALA | A | 13 | −9.941 | 15.720 | 4.563 |
| ATOM | 609 | CB | ALA | A | 13 | −10.413 | 14.306 | 7.626 |
| ATOM | 610 | N | ILE | A | 14 | −8.171 | 15.046 | 5.783 |
| ATOM | 611 | CA | ILE | A | 14 | −7.343 | 14.746 | 4.623 |
| ATOM | 612 | C | ILE | A | 14 | −6.475 | 13.559 | 5.004 |
| ATOM | 613 | O | ILE | A | 14 | −6.212 | 13.316 | 6.183 |
| ATOM | 614 | CB | ILE | A | 14 | −6.401 | 15.916 | 4.183 |
| ATOM | 615 | CG1 | ILE | A | 14 | −5.284 | 16.106 | 5.200 |
| ATOM | 616 | CG2 | ILE | A | 14 | −7.188 | 17.211 | 3.982 |
| ATOM | 617 | CD1 | ILE | A | 14 | −4.173 | 16.973 | 4.696 |
| ATOM | 618 | N | SER | A | 15 | −6.045 | 12.806 | 3.999 |
| ATOM | 619 | CA | SER | A | 15 | −5.187 | 11.662 | 4.242 |
| ATOM | 620 | C | SER | A | 15 | −3.740 | 12.089 | 4.217 |
| ATOM | 621 | O | SER | A | 15 | −3.360 | 13.020 | 3.508 |
| ATOM | 622 | CB | SER | A | 15 | −5.416 | 10.584 | 3.185 |
| ATOM | 623 | OG | SER | A | 15 | −6.667 | 9.971 | 3.401 |
| ATOM | 624 | N | MET | A | 16 | −2.933 | 11.409 | 5.012 |
| ATOM | 625 | CA | MET | A | 16 | −1.518 | 11.700 | 5.047 |
| ATOM | 626 | C | MET | A | 16 | −0.778 | 10.414 | 5.244 |
| ATOM | 627 | O | MET | A | 16 | −1.137 | 9.594 | 6.078 |
| ATOM | 628 | CB | MET | A | 16 | −1.170 | 12.694 | 6.164 |
| ATOM | 629 | CG | MET | A | 16 | −1.848 | 14.042 | 5.974 |
| ATOM | 630 | SD | MET | A | 16 | −1.017 | 15.431 | 6.760 |
| ATOM | 631 | CE | MET | A | 16 | −0.799 | 14.823 | 8.475 |
| ATOM | 632 | N | LEU | A | 17 | 0.238 | 10.231 | 4.426 |
| ATOM | 633 | CA | LEU | A | 17 | 1.077 | 9.065 | 4.508 |
| ATOM | 634 | C | LEU | A | 17 | 2.289 | 9.610 | 5.264 |
| ATOM | 635 | O | LEU | A | 17 | 2.939 | 10.565 | 4.818 |
| ATOM | 636 | CB | LEU | A | 17 | 1.461 | 8.608 | 3.100 |
| ATOM | 637 | CG | LEU | A | 17 | 2.324 | 7.355 | 2.955 |
| ATOM | 638 | CD1 | LEU | A | 17 | 1.553 | 6.145 | 3.445 |
| ATOM | 639 | CD2 | LEU | A | 17 | 2.723 | 7.190 | 1.492 |
| ATOM | 640 | N | TYR | A | 18 | 2.581 | 9.029 | 6.418 |
| ATOM | 641 | CA | TYR | A | 18 | 3.706 | 9.501 | 7.196 |
| ATOM | 642 | C | TYR | A | 18 | 4.434 | 8.333 | 7.835 |
| ATOM | 643 | O | TYR | A | 18 | 4.081 | 7.186 | 7.603 |
| ATOM | 644 | CB | TYR | A | 18 | 3.222 | 10.458 | 8.281 |
| ATOM | 645 | CG | TYR | A | 18 | 2.386 | 9.782 | 9.346 |
| ATOM | 646 | CD1 | TYR | A | 18 | 1.029 | 9.527 | 9.147 |
| ATOM | 647 | CD2 | TYR | A | 18 | 2.961 | 9.379 | 10.550 |
| ATOM | 648 | CE1 | TYR | A | 18 | 0.273 | 8.894 | 10.128 |
| ATOM | 649 | CE2 | TYR | A | 18 | 2.218 | 8.745 | 11.526 |
| ATOM | 650 | CZ | TYR | A | 18 | 0.877 | 8.508 | 11.317 |
| ATOM | 651 | OH | TYR | A | 18 | 0.134 | 7.922 | 12.318 |
| ATOM | 652 | N | LEU | A | 19 | 5.439 | 8.651 | 8.650 |
| ATOM | 653 | CA | LEU | A | 19 | 6.255 | 7.661 | 9.347 |
| ATOM | 654 | C | LEU | A | 19 | 6.210 | 7.946 | 10.847 |
| ATOM | 655 | O | LEU | A | 19 | 6.685 | 8.992 | 11.288 |
| ATOM | 656 | CB | LEU | A | 19 | 7.701 | 7.763 | 8.871 |
| ATOM | 657 | CG | LEU | A | 19 | 7.901 | 7.850 | 7.359 |
| ATOM | 658 | CD1 | LEU | A | 19 | 9.300 | 8.379 | 7.039 |
| ATOM | 659 | CD2 | LEU | A | 19 | 7.669 | 6.482 | 6.748 |

[0260] Structure coordinates: As used herein, unless indicated otherwise or contradictory in context, the “structure coordinates” refers to Cartesian coordinates derived from mathematical equations related to the patterns obtained on diffraction of a monochromatic beam of X-rays by the atoms (scattering centers) of a protein, protein complex or peptide in crystal form. The diffraction data are used to calculate an electron density map of the repeating unit of the crystal. The electron density maps are then used to establish the positions of the individual atoms of the molecule or molecular complex.

[0261] STAMP: STAMP (Structural Alignment of Multiple Proteins) is a tool for aligning protein sequences based on a three-dimensional structure. Its algorithm minimizes the Cα distance between aligned residues of each molecule by applying globally optimal rigid-body rotations and translations. This program provides some information on the equivalence of the residues between the selected models.

[0262] SCWRL: This program predicts and optimizes the protein side-chain conformations. It is using the backbone of a support protein and a backbone-dependent rotamer library. The possible conformations are explored by minimizing the steric hindrance between the side-chains and between the side-chains and the backbone.

[0263] GROMACS: GROMACS is a molecular dynamics package. The “gmx rms” tool included in GROMACS compares two structures by computing the root mean square deviation (RMSD).

[0264] In one aspect, the present disclosure provides for non-mutagenic extracellular therapies having the ability to direct cell fate. It is thus possible to convert or recode a neoplastic cell by modifying its surrounding extracellular micro-environment, in-vitro, ex-vivo or in-vivo, so that the cell operates self-recovery or self-healing and a subject possessing such a neoplastic cell may be protected from a neoplastic disease.

[0265] In one example, a neoplastic cell may operate self-recovery or self-healing e.g. by inducing a quiescence state so that the neoplastic cell may remain inactive or dormant for seconds, minutes, hours, days, weeks, months or years, in particular, will never resume neoplasia; and/or by preventing, reducing or suppressing cell division and/or cell proliferation, preferably uncontrolled cell division and/or cell proliferation of said neoplastic cell; and/or by regulating or promoting anti-mitogen activity and/or tumour suppressor pathways and/or anti-oncogenic activity in said neoplastic cell; and/or by inducing cytostaticity and not cytotoxicity in the neoplastic cell; and/or by inducing differentiation; and/or by regulating and/or modulating the adhesion or interactions between the cell and its micro-environment (i.e. the surrounding ECM) so as activate, reactivate or restore cell adhesion checkpoints in said neoplastic cell.

[0266] In one aspect, the present disclosure provides a pharmaceutical association or combination having the ability to convert or recode, extracellularly, a neoplastic cell, in-vitro, ex-vivo or in-vivo, so that it may be used in the treatment, prevention and/or diagnostic of a neoplastic disease, said association comprising at least one growth factor receptor-binding compound which activates at least one growth factor receptor of a cell (in particular a neoplastic cell) and at least one adhesion protein inhibitor or antagonist which inhibits or antagonises at least one transmembrane cell adhesion protein of said cell.

[0267] In certain embodiments, said pharmaceutical association or combination reduces, down-regulates, inhibits or suppresses (i) the gene and/or protein expression of at least one cyclin-D in the cell (in particular a neoplastic cell) and/or (ii) the formation of at least one complex formed between said at least one cyclin-D and at least one of cyclin dependent-kinase (CDK) 4 or 6 in the cell (in particular a neoplastic cell).

[0268] II. Growth Factor Receptor-Binding Compounds

[0269] In one aspect, the present disclosure provides for pharmaceutical associations or combinations comprising at least one growth factor receptor-binding compound as defined herein and at least one adhesion protein inhibitor or antagonist as defined herein, said associations or combinations having the ability to convert or recode a neoplastic cell into a non-neoplastic cell.

[0270] As used herein, the term “Growth factor receptor-binding compound” or “GFR-binding compound” refers to an exogenous or endogenous compound, molecule or substance (a) having an (binding) affinity for a growth factor receptor as defined herein and (b) comprising the ability to activate a growth factor receptor as defined herein.

[0271] There are many ways to test, measure and present the binding affinity of a given substance for a given receptor, but for the purpose of the present disclosure, and for the avoidance of any doubts, the (binding) affinity values of a given GFR-binding compound to a given GFR are provided using the method of fluorescence anisotropy. In this method, a GFR-binding compound is fluorescently labelled using technics well established in the art. Binding of the resulting labelled compound to a growth factor receptor results in a fluctuation of fluorescence anisotropy which is used to construct an affinity binding curve from which the GFR-binding compound binding affinity value is derived. Using this technique, binding affinity values are given in the form of dissociation constants Kd. In certain embodiments, GFR-binding compounds of the present disclosure have Kd values as measured by fluorescence anisotropy of more than 1 (one) picomolar (pM). In certain embodiments, GFR-binding compounds of the present disclosure have Kd values as measured by fluorescence anisotropy of more than 1 (one) nanomolar (nM). In certain embodiments, GFR-binding compounds of the present disclosure have Kd values as measured by fluorescence anisotropy of more than 10 (ten) nanomolar (nM). In certain embodiments, GFR-binding compounds of the present disclosure have Kd values as measured by fluorescence anisotropy of more than 100 (one hundred) nanomolar (nM). In certain embodiments, GFR-binding compounds of the present disclosure have Kd values as measured by fluorescence anisotropy of more than 1 (one) micromolar (μM). In certain embodiments, GFR-binding compounds of the present disclosure have Kd values as measured by fluorescence anisotropy of more than 10 (ten) micromolar (μM). In certain embodiments, GFR-binding compounds of the present disclosure have Kd values as measured by fluorescence anisotropy of more than 100 (one hundred) micromolar (μM).

[0272] There are many ways to test and measure the ability of a given substance to activate a given receptor, but for the purpose of the present disclosure, and for the avoidance of any doubts, a given GFR-binding compound activates a growth factor receptor if it induces growth factor receptor phosphorylation as measured by the western blot method. There are many distinct phosphorylation sites on growth factor receptors and they may widely vary according to the type of growth factor receptor as reported in the published scientific article from Mark A. Lemmon and Joseph Schlessinger, “Cell Signaling by Receptor Tyrosine Kinases”, Cell. 2010; 141(7), 1117-1134, which is hereby incorporated by reference in its entirety.

[0273] Growth factor receptor: As used herein, unless indicated otherwise or contradictory in context, the term “growth factor receptor” or “GFR” is a receptor which binds to growth factors which are naturally occurring substances capable of stimulating, for instance, cellular growth, proliferation, healing, and cellular differentiation. Suitable as growth factor receptors for implementing embodiments of the present invention include epidermal growth factor receptors (EGFR), fibroblast growth factor receptors (FGFR), vascular endothelial growth factor receptors (VEGFR), nerve growth factor receptors (NGFR), Insulin receptor family, Trk receptor family, Eph receptor family, AXL receptor family, LTK receptor family, TIE receptor family, ROR receptor family, DDR receptor family, RET receptor family, KLG receptor family, RYK receptor family, MuSK receptor family, hepatocyte growth factor receptors (HGFR), somatomedin or insulin-like growth factor receptors (SGFR), platelet-derived growth factor receptors (PDGFR), transforming growth factor beta (TGF-β) superfamily proteins such as AMH, ARTN, BMP10, BMP15, BMP2, BMP3, BMP4, BMP5, BMP6, BMP7, BMP8A, BMP8B, GDF1, GDF10, GDF11, GDF15, GDF2, GDF3, GDF3A, GDF5, GDF6, GDF7, GDF8, GDF9, GDNF, INHA, INHBA, INHBB, INHBC, INHBE, LEFTY1, LEFTY2, MSTN, NODAL, NRTN, PSPN, TGFB1, TGFB2 and TGFB3, and any combination thereof.

[0274] Growth factor: As used herein, unless indicated otherwise or contradictory in context, the term “growth factor” refers to any substance(s) having the ability to bind to a growth factor receptor and produce (a) biological effect(s) or reaction(s), such as promoting the growth of tissues, by activating such a growth factor receptor. Exemplary growth factors include, but are not limited to, platelet-derived growth factor (PDGF), platelet-derived angiogenesis factor (PDAF), vascular endotheial growth factor (VEGF), platelet-derived epidermal growth factor (PDEGF), transforming growth factor beta (TGF-β), transforming growth factor A (TGF-A), epidermal growth factor (EGF), fibroblast growth factor (FGF), acidic fibroblast growth factor (FGF-A), basic fibroblast growth factor (FGF-B), insulin-like growth factors 1 and 2 (IGF-I and IGF-2), keratinocyte growth factor (KGF), tumor necrosis factor (TNF), fibroblast growth factor (FGF) and interleukin-1 (IL-I), Keratinocyte Growth Factor-2 (KGF-2), and combinations thereof.

[0275] Activation of growth factor receptors: As used herein, unless indicated otherwise or contradictory in context, the term “activating” or “activation of”, when used in relation to a growth factor receptor, refers to the phosphorylation of the tyrosine kinase domain of such a growth factor receptor.

[0276] In one aspect, the present disclosure provides a GFR-binding compound, as part of a pharmaceutical association, combination or composition as defined herein, as an active principle for use in methods and uses described herein.

[0277] In one particular example, the growth factor receptor involved in the interaction with said GFR-binding compound is an epidermal growth factor receptor. In one particular example, the growth factor receptor involved in the interaction with said GFR-binding compound is a fibroblast growth factor receptor. In one particular example, the growth factor receptor involved in the interaction with said GFR-binding compound is a vascular endothelial growth factor receptor. In one particular example, the growth factor receptor involved in the interaction with said GFR-binding compound is a nerve growth factor receptor. In one particular example, the growth factor receptor involved in the interaction with said GFR-binding compound is a hepatocyte growth factor receptor. In one particular example, the growth factor receptor involved in the interaction with said GFR-binding compound is a somatomedin or insulin-like growth factor receptor. In one particular example, the growth factor receptor involved in the interaction with said GFR-binding compound is a platelet-derived growth factor receptor. In one particular example, the growth factor receptor involved in the interaction with said GFR-binding compound is a protein from the transforming growth factor beta (TGF-β) superfamily.

[0278] In one particular example, the growth factor receptor(s) involved in the interaction with said GFR-binding compound is (are) preferably selected from the group consisting of epidermal growth factor receptors, fibroblast growth factor receptors, vascular endothelial growth factor receptors, nerve growth factor receptors, hepatocyte growth factor receptors, somatomedin or insulin-like growth factor receptors, platelet-derived growth factor receptors, and transforming growth factor beta (TGF-β) superfamily proteins.

[0279] In one particular example, the gene expression of cyclin-D, in a neoplastic cell, is reduced, down-regulated, inhibited or suppressed during phase G1 of the cell cycle. In one particular example, the gene expression of cyclin-D is reduced or suppressed for substantially at least the entire duration of phase G1 of a cell cycle. In one particular example, the gene expression of cyclin-D is reduced by at least 20%. In one particular example, the gene expression of cyclin-D is reduced by at least 30%. In one particular example, the gene expression of cyclin-D is reduced by at least 40%. In one particular example, the gene expression of cyclin-D is reduced by at least 50%. In one particular example, the gene expression of cyclin-D is reduced by at least 60%. In one particular example, the gene expression of cyclin-D is reduced by at least 70%. In one particular example, the gene expression of cyclin-D is reduced by at least 80%. At least 40% is particularly preferred. Reduction of cyclin D gene expression is assessed with respect to the wild-type gene expression of cyclin-D and is measured by Quantitative Real Time Polymerase Chain Reaction (Q-PCR or RT-PCR) by (i) extracting RNA from the treated cells, (ii) converting the extracted RNA into the corresponding cDNA, (iii) subjecting the obtained cDNA to a real-time PCR amplification, (iv) analysing the data obtained from the real-time PCR amplification and comparing them with the data obtained by the ΔΔCt method, and (v) comparing the obtained values to the wild-type value.

[0280] In more details, Quantitative Real Time Polymerase Chain Reaction is carried out by (i) extracting RNA from the treated cells using the RNeasy total RNA kit from Qiagen®, (ii) converting the extracted RNA into the corresponding cDNA using a reverse transcription reaction (Gibco Brl®) and random primers from Invitrogen®, (iii) subjecting the obtained cDNA to a real-time PCR amplification in the presence of SYBR green reagents from Bio-Rad® in a thermocycler (iCycler, Biorad®), (iv) analysing the data obtained from the real-time PCR amplification with the iCycler IQ™ software following the iCycler iQ™ Real-Time PCR Detection System's instruction manual (Catalog Number 170-8740) and using weighted mean as a digital filter, PCR Baseline Subtracted Curve Fit as the analysis mode, FAM/490 as a fluorophore, the automatic calculation of the baseline cycles and the threshold, and the default settings for all other parameters, and comparing them with the data obtained by the ΔΔCt method as reported and described in Livak, K. J. and T. D. Schmittgen. “Analysis of relative gene expression data using real-time quantitative PCR and the 2(-Delta Delta C(T)) Method”, Methods (2001) 25(4): 402-408, hereby incorporated by reference in its entirety, and (v) comparing the obtained values to the wild-type value.

[0281] In one particular example, the gene expression of cyclin-D is maintained at such a reduced level (at least 20%, at least 30%, at least 40%, at least 50%, at least 60%, at least 70%, or at least 80%) during phase G1 of a cell cycle of the treated neoplastic cell. In one example, the gene expression of cyclin-D is maintained at such a reduced level during substantially the entire duration of the G1 phase. In one example, the gene expression of cyclin-D is maintained at such a reduced level during substantially the entire duration of the G1 and S phases. In one example, the gene expression of cyclin-D is maintained at such a reduced level during substantially the entire duration of the G1, S and G2 phases. In one example, the gene expression of cyclin-D is maintained at such a reduced level during substantially the entire duration of the G1, S, G2 and M phases i.e. during substantially the entire duration of a cell cycle of a treated neoplastic cell. Reduction of the gene expression level of cyclin D during substantially the entire duration of G1 is preferred.

[0282] As used herein, unless indicated otherwise or contradictory in context, the term “wild-type expression” of a protein or a gene, refers to the expression of a protein or a gene observed in normal, standard biological conditions i.e., in the present disclosure, without the presence of, or prior to the provision or administration to a neoplastic cell of a pharmaceutical association, combination or composition as defined herein. In-vitro, ex-vivo or in-vivo natural expression level of a protein or a gene in a neoplastic cell may thus be used as a comparative data (or control) to assess and quantify the effect of the presence or administration of a pharmaceutical association, combination or composition as defined herein on the expression level of such a protein or gene in that cell.

[0283] Suitable GFR-binding compounds for implementing certain embodiments of the invention include, without being limited to, linear (i.e. non-cyclic) GFR-binding compounds such as peptides, or variants or analogs thereof, or peptidomimetics, and cyclic GFR-binding compounds such as cyclic peptides, or variants or analogs thereof, or cyclic peptidomimetics.

[0284] II.1. Non-Cyclic GFR-Binding Compounds

[0285] In one example, said non-cyclic GFR-binding compound has a molecular weight of less than 4,000 Daltons. In one particular example, said non-cyclic GFR-binding compound has a molecular weight of less than 3,000 Daltons. In one particular example, said non-cyclic GFR-binding compound has a molecular weight comprised between 600 and 4,000 Daltons. In one particular example, said non-cyclic GFR-binding compound has a molecular weight comprised between 800 and 4,000 Daltons. In one particular example, said non-cyclic GFR-binding compound has a molecular weight comprised between 600 and 3,000 Daltons. In one particular example, said non-cyclic GFR-binding compound has a molecular weight comprised between 800 and 3,000 Daltons. Between 800 and 3,000 Daltons is particularly preferred.

[0286] In one particular example, said GFR-binding compound is a (non-cyclic) peptide, or a variant or analog thereof, with (exclusively consisting of, or constituted of) between 8-30 amino acids, in particular between 8-25 amino acids or between 8-22 amino acids, more particularly between 18-22 amino acids, even more particularly between 19-21 or 20 amino acids, having growth factor receptor-binding capability or capabilities.

[0287] In one particular example, said GFR-binding compound is a (non-cyclic) peptidomimetic as defined herein, comprising (consecutively or non-consecutively) between 8-30 amino acids, in particular between 8-25 amino acids or between 8-22 amino acids, more particularly between 18-22 amino acids, even more particularly between 19-21 or 20; wherein said GFR-binding compound has a molecular weight comprised between 600 and 4,000 Daltons (in particular, between 800-4,000 Da, 600-3,000 Da, more particularly between 800-3,000 Da);

[0288] In one particular example, said GFR-binding compound is a peptide, a variant or analog thereof, or a peptidomimetic as defined herein, having growth factor receptor-binding capability or capabilities, having a molecular weight of between 600-4,000 Da, 600-3,000 Da, or 800-4,000 Da, in particular between 800 and 3,000 Da.

[0289] In one particular example, said GFR-binding compound is a peptide, a variant or analog thereof, or a peptidomimetic as defined herein, having growth factor receptor-binding capability or capabilities, with (comprising, or exclusively consisting of, or constituted of) between 8 and 30 (in particular between 8-25 or between 8-22, more particularly between 18-22, even more particularly between 19-21 or 20) amino acids, comprising a peptide with four amino acids (PEP1).

[0290] In one particular example, said GFR-binding compound is a peptide, a variant or analog thereof, or a peptidomimetic as defined herein, with (comprising, or exclusively consisting of, or constituted of) between 8 and 30 (in particular between 8-25 or between 8-22, more particularly between 18-22, even more particularly between 19-21 or 20) amino acids, comprising a peptide with eight amino acids (PEP12).

[0291] In one particular example, said GFR-binding compound is a peptide, a variant or analog thereof, or a peptidomimetic as defined herein, with (comprising, or exclusively consisting of, or constituted of) between 8 and 30 (in particular between 8-25 or between 8-22, more particularly between 18-22, even more particularly between 19-21 or 20) amino acids, comprising a peptide with four amino acids (PEP1); wherein said GFR-binding compound further comprises a peptide with three amino acids (PEP3).

[0292] In one particular example, said GFR-binding compound is a peptide, a variant or analog thereof, or a peptidomimetic as defined herein, with (comprising, or exclusively consisting of, or constituted of) between 8 and 30 (in particular between 8-25 or between 8-22, more particularly between 18-22, even more particularly between 19-21 or 20) amino acids, comprising a peptide with eight amino acids (PEP12); wherein said GFR-binding compound further comprises a peptide with three amino acids (PEP3).

[0293] In one particular example, said GFR-binding compound is a peptide, a variant or analog thereof, or a peptidomimetic as defined herein, with (comprising, or exclusively consisting of, or constituted of) between 8 and 30 (in particular between 8-25 or between 8-22, more particularly between 18-22, even more particularly between 19-21 or 20) amino acids, comprising a peptide with four amino acids (PEP1); wherein said GFR-binding compound further comprises a peptide with five amino acids (PEP5).

[0294] In one particular example, said GFR-binding compound is a peptide, a variant or analog thereof, or a peptidomimetic as defined herein, with (comprising, or exclusively consisting of, or constituted of) between 8 and 30 (in particular between 8-25 or between 8-22, more particularly between 18-22, even more particularly between 19-21 or 20) amino acids, comprising a peptide with eight amino acids (PEP12); wherein said GFR-binding compound further comprises a peptide with five amino acids (PEP5).

[0295] In one particular example, said GFR-binding compound is a peptide, a variant or analog thereof, or a peptidomimetic as defined herein, with (comprising, or exclusively consisting of, or constituted of) between 8 and 30 (in particular between 8-25 or between 8-22, more particularly between 18-22, even more particularly between 19-21 or 20) amino acids, comprising a peptide with four amino acids (PEP1); wherein said GFR-binding compound further comprises a peptide with between six and twelve amino acids (PEP9).

[0296] In one particular example, said GFR-binding compound is a peptide, a variant or analog thereof, or a peptidomimetic as defined herein, with (comprising, or exclusively consisting of, or constituted of) between 8 and 30 (in particular between 8-25 or between 8-22, more particularly between 18-22, even more particularly between 19-21 or 20) amino acids, comprising a peptide with eight amino acids (PEP12); wherein said GFR-binding compound further comprises a peptide with between six and twelve amino acids (PEP9).

[0297] In one particular example, said GFR-binding compound is a peptide, a variant or analog thereof, or a peptidomimetic as defined herein, with (comprising, or exclusively consisting of, or constituted of) between 8 and 30 (in particular between 8-25 or between 8-22, more particularly between 18-22, even more particularly between 19-21 or 20) amino acids, comprising a peptide with four amino acids (PEP1); wherein said GFR-binding compound further comprises a peptide with three amino acids (PEP3), an amino acid or a peptide with between two and seven amino acids (PEP7).

[0298] In one particular example, said GFR-binding compound is a peptide, a variant or analog thereof, or a peptidomimetic as defined herein, with (comprising, or exclusively consisting of, or constituted of) between 8 and 30 (in particular between 8-25 or between 8-22, more particularly between 18-22, even more particularly between 19-21 or 20) amino acids, comprising a peptide with four amino acids (PEP12); wherein said GFR-binding compound further comprises a peptide with three amino acids (PEP3), an amino acid or a peptide with between two and seven amino acids (PEP7).

[0299] In one particular example, said GFR-binding compound is a peptide, a variant or analog thereof, or a peptidomimetic as defined herein, with (comprising, or exclusively consisting of, or constituted of) between 8 and 30 (in particular between 8-25 or between 8-22, more particularly between 18-22, even more particularly between 19-21 or 20) amino acids, comprising a peptide with four amino acids (PEP1); wherein said GFR-binding compound further comprises a peptide with five amino acids (PEP5), an amino acid or a peptide with between two and seven amino acids (PEP7).

[0300] In one particular example, said GFR-binding compound is a peptide, a variant or analog thereof, or a peptidomimetic as defined herein, with (comprising, or exclusively consisting of, or constituted of) between 8 and 30 (in particular between 8-25 or between 8-22, more particularly between 18-22, even more particularly between 19-21 or 20) amino acids, comprising a peptide with four amino acids (PEP12); wherein said GFR-binding compound further comprises a peptide with five amino acids (PEP5), an amino acid or a peptide with between two and seven amino acids (PEP7).

[0301] In one particular example, said GFR-binding compound is a peptide, a variant or analog thereof, or a peptidomimetic as defined herein, with (comprising, or exclusively consisting of, or constituted of) between 8 and 30 (in particular between 8-25 or between 8-22, more particularly between 18-22, even more particularly between 19-21 or 20) amino acids, having the following general formula (Ia) (hereinafter may also be referred to as compound (Ia) or peptide (Ia));

PEP(C)-PEP12 (Ia)

[0302] wherein PEP12 is a peptide with 8 amino acids of formula PEP1-AA¹⁷-PEP11 as defined herein; wherein one end of PEP(C) interacts covalently with PEP12 via one end of PEP1; wherein PEP(C) is a peptide with at least 5 amino acids, in particular a peptide with between 5 and 12 amino acids.

[0303] In one aspect, the present disclosure provides a GFR-binding compound of general formula (Ia), wherein PEP(C) comprises PEP3.

[0304] In one aspect, the present disclosure provides a GFR-binding compound of general formula (Ia), wherein PEP(C) comprises PEP5. In one particular example, PEP(C) is PEP5.

[0305] In one aspect, the present disclosure provides a GFR-binding compound of general formula (Ia), wherein PEP(C) comprises PEP9. In one particular example, PEP(C) is PEP9.

[0306] In one aspect, the present disclosure provides a GFR-binding compound of general formula (Ia), wherein PEP(C) comprises PEP3 and PEP7.

[0307] In one aspect, the present disclosure provides a GFR-binding compound of general formula (Ia), wherein PEP(C) comprises PEP5 and PEP7.

[0308] In one particular example, said GFR-binding compound is a peptide, a variant or analog thereof, or a peptidomimetic as defined herein, with (comprising, or exclusively consisting of, or constituted of) between 8 and 30 (in particular between 8-25 or between 8-22, more particularly between 18-22, even more particularly between 19-21 or 20) amino acids, having the following general formula (IIa) (hereinafter may also be referred to as compound (IIa) or peptide (IIa)):

PEP7-PEP5-PEP12 (IIa)

[0309] wherein PEP12 is a peptide with 8 amino acids of formula PEP1-AA¹⁷-PEP11 as defined herein; wherein PEP5 is a peptide with five amino acids as defined herein; wherein PEP7 is an amino acid or a peptide with between two and seven amino acids as defined herein; wherein one end of PEP5 interacts covalently with one end of PEP12 via one end of PEP1; wherein another end of PEP5 interacts covalently with one end of PEP7 via AA⁷.

[0310] In certain embodiments, PEP1 is selected from the group consisting of SAIS, SSLS, NAIS, SATS, SPIS, EPIS, SPIN, KPLS, EPLP, EPLT, SNIT, RSVK and RPVQ.

[0311] In certain embodiments, PEP3 is selected from the group consisting of VPT, VPE, APT, TPT, VPA, APV, VPQ, VSQ, SRV and TQV.

[0312] In certain embodiments, PEP5 is a peptide of general formula PEP3-AA¹¹-AA¹²; wherein PEP3 is selected from the group consisting of VPT, VPE, APT, TPT, VPA, APV, VPQ, VSQ, SRV and TQV; wherein AA¹¹ is selected from the group consisting of E, K, Q, R, A, D, G and H; and wherein AA¹² is selected from the group consisting of L, M, T, E, Q and H. In one particular example, PEP5 is selected from the group consisting of VPTEL, VPEKM, APTKL, APTQL, VPTKL, TPTKM, VPARL, VPTRL, APVKT, VPQAL, VSQDL, VPQDL, VPTEE, VPTGQ, SRVHH and TQVQL.

[0313] In certain embodiments, PEP7 is an amino acid or a peptide with between two and seven amino acids of general formula AA¹-AA²-AA³-AA⁴-AA⁵-AA⁶-AA⁷; wherein wherein AA¹, AA², AA³, AA⁴, and AA⁵ are independently absent or AA^{I} as defined herein; wherein AA⁶ is absent or selected from the group consisting of S, T, C, E, Q, P and R; wherein AA⁷ is absent or is selected from the group consisting of S, T, C, E, Q, P and R, and wherein at least one of AA¹, AA², AA³, AA⁴, AA⁵, AA⁶ or AA⁷ is not absent. In one particular example, PEP7 is selected from the group consisting of KIPKAXX, GIPEPXX, SIPKAXX, HVTKPTX, YVPKPXX, TVPKPXX, AVPKAXX, KVGKAXX, KASKAXX, GSAGPXX, AAPASXX, STPPTXX, HVPKPXX, RVPSTXX, ASAAPXX, ASASPXX, NDEGLEX, SSVKXQP and RNVQXRP, wherein X is C or S throughout the present description.

[0314] In certain embodiments, PEP9 is a peptide of general formula PEP7-PEP5; wherein PEP5 is a peptide of formula PEP3-AA¹¹-AA¹²; wherein PEP3 is selected from the group consisting of VPT, VPE, APT, TPT, VPA, APV, VPQ, VSQ, SRV and TQV; wherein AA¹¹ is selected from the group consisting of E, K, Q, R, A, D, G and H; and wherein AA¹² is selected from the group consisting of L, M, T, E, Q and H; wherein PEP7 is an amino acid or a peptide with between two and seven amino acids of general formula AA¹-AA²-AA³-AA⁴-AA⁵-AA⁶-AA⁷; wherein AA¹, AA², AA³, AA⁴, and AA⁵ are independently absent or AA^{I} as defined herein; wherein AA⁶ is absent or selected from the group consisting of S, T, C, E, Q, P and R; wherein AA⁷ is absent or is selected from the group consisting of S, T, C, E, Q, P and R. In one particular example, PEP9 is selected from the group consisting of KIPKAXXVPTEL, GIPEPXXVPEKM, SIPKAXXVPTEL, HVTKPTXAPTKL, YVPKPXXAPTKL, TVPKPXXAPTQL, AVPKAXXAPTKL, KVGKAXXVPTKL, KASKAXXVPTKL, GSAGPXXTPTKM, AAPASXXVPARL, STPPTXXVPTRL, HVPKPXXAPTKL, RVPSTXXAPVKT, ASAAPXXVPQAL, ASASPXXVSQDL, ASASPXXVPQDL, NDEGLEXVPTEE, NDEGLEXVPTGQ, SSVKXQPSRVHH and RNVQXRPTQVQL, wherein X is C or S throughout the present description.

[0315] In certain embodiments, PEP12 is a peptide of general formula PEP1-AA¹⁷-PEP11; wherein AA¹⁷ is selected from the group consisting of G, A, V, L, I, P, F, M, W, T and S (in particular is selected from the group consisting of M, I, L, V and T); wherein PEP1 is selected from the group consisting of SAIS, SSLS, NAIS, SATS, SPIS, EPIS, SPIN, KPLS, EPLP, EPLT, SNIT, RSVK and RPVQ.

[0316] In particular, in certain embodiments, the pair PEP3:PEP1 is selected from the group consisting of

VPT:SAIS, VPE:SAIS, APT:SAIS, TPT:SAIS, VPA:SAIS,
APV:SAIS, VPQ:SAIS, VSQ:SAIS, SRV:SAIS, TQV:SAIS,
VPE:SSLS, VPT:SSLS, APT:SSLS, TPT:SSLS, VPA:SSLS,
APV:SSLS, VPQ:SSLS, VSQ:SSLS, SRV:SSLS, TQV:SSLS,
APT:NAIS, VPT:NAIS, VPE:NAIS, TPT:NAIS, VPA:NAIS,
APV:NAIS, VPQ:NAIS, VSQ:NAIS, SRV:NAIS, TQV:NAIS,
APT:SATS, VPT:SATS, VPE:SATS, TPT:SATS, VPA:SATS,
APV:SATS, VPQ:SATS, VSQ:SATS, SRV:SATS, TQV:SATS,
VPT:SPIS, VPE:SPIS, APT:SPIS, TPT:SPIS, VPA:SPIS,
APV:SPIS, VPQ:SPIS, VSQ:SPIS, SRV:SPIS, TQV:SPIS,
VPT:EPIS, VPE:EPIS, APT:EPIS, TPT:EPIS, VPA:EPIS,
APV:EPIS, VPQ:EPIS, VSQ:EPIS, SRV:EPIS, TQV:EPIS,
TPT:SPIN, VPT:SPIN, VPE:SPIN, APT:SPIN, VPA:SPIN,
APV:SPIN, VPQ:SPIN, VSQ:SPIN, SRV:SPIN, TQV:SPIN,
APV:KPLS, VPT:KPLS, VPE:KPLS, APT:KPLS, TPT:KPLS,
VPA:KPLS, VPQ:KPLS, VSQ:KPLS, SRV:KPLS, TQV:KPLS,
VPQ:EPLP, VPT:EPLP, VPE:EPLP, APT:EPLP, TPT:EPLP,
VPA:EPLP, APV:EPLP, VSQ:EPLP, SRV:EPLP, TQV:EPLP,
VSQ:EPLT, VPT:EPLT, VPE:EPLT, APT:EPLT, TPT:EPLT,
VPA:EPLT, APV:EPLT, VPQ:EPLT, SRV:EPLT, TQV:EPLT,
VPT:SNIT, VPE:SNIT, APT:SNIT, TPT:SNIT, VPA:SNIT,
APV:SNIT, VPQ:SNIT, VSQ:SNIT, SRV:SNIT, TQV:SNIT,
SRV:RSVK, VPT:RSVK, VPE:RSVK, APT:RSVK, TPT:RSVK,
VPA:RSVK, APV:RSVK, VPQ:RSVK, VSQ:RSVK, TQV:RSVK,
TQV:RPVQ, VPT:RPVQ, VPE:RPVQ, APT:RPVQ, TPT:RPVQ,
VPA:RPVQ, APV:RPVQ, VPQ:RPVQ, VSQ:RPVQ
and
SRV:RPVQ.

[0317] In particular, in certain embodiments, the pair PEP5:PEP1 is selected from the group consisting of

VPTKM:SAIS, VPTKL:SAIS, VPTQL:SAIS, VPTRL:SAIS,
VPTKT:SAIS, VPTAL:SAIS, VPTDL:SAIS, VPEKM:SAIS,
APTKL:SAIS, APTQL:SAIS, TPTKM:SAIS, VPARL:SAIS,
APVKT:SAIS, VPQAL:SAIS, VSQDL:SAIS, VPQDL:SAIS,
SRVHH:SAIS, TQVQL:SAIS, VPEEL:SSLS, VPEKL:SSLS,
VPEQL:SSLS, VPEKM:SSLS, VPERL:SSLS, VPEKT:SSLS,
VPEAL:SSLS, VPEDL:SSLS, VPTEL:SSLS, APTKL:SSLS,
APTQL:SSLS, VPTKL:SSLS, TPTKM:SSLS, VPARL:SSLS,
VPTRLSSLS, APVKT:SSLS, VPQAL:SSLS, VSQDL:SSLS,
VPQDL:SSLS, VPTEE:SSLS, VPTGQSSLS, SRVHH:SSLS,
TQVQL:SSLS, APTEL:NAIS, APTKM:NAIS, APTKL:NAIS,
APTRL:NAIS, APTKT:NAIS, APTAL:NAIS, APTDL:NAIS,
VPTEL:NAIS, VPEKM:NAIS, VPTKL:NAIS, TPTKM:NAIS,
VPARL:NAIS, VPTRL:NAIS, APVKT:NAIS, VPQAL:NAIS,
VSQDL:NAIS, VPQDL:NAIS, VPTEE:NAIS, VPTGQ:NAIS,
SRVHH:NAIS, TQVQL:NAIS, APTEL:SATS, APTKM:SATS,
APTKL:SATS, APTQL:SATS, APTRL:SATS, APTKT:SATS,
APTAL:SATS, APTDL:SATS, VPTEL:SATS, VPEKM:SATS,
VPTKL:SATS, TPTKM:SATS, VPARL:SATS, VPTRL:SATS,
APVKT:SATS, VPQAL:SATS, VSQDL:SATS, VPQDL:SATS,
VPTEE:SATS, VPTGQ:SATS, SRVHH:SATS, TQVQL:SATS,
VPTEL:SPIS, VPTKM:SPIS, VPTKL:SPIS, VPTQL:SPIS,
VPTRL:SPIS, VPTKT:SPIS, VPTAL:SPIS, VPTDL:SPIS,
VPEKM:SPIS, APTKL:SPIS, APTQL:SPIS, TPTKM:SPIS,
VPARL:SPIS, APVKT:SPIS, VPQAL:SPIS, VSQDL:SPIS,
VPQDL:SPIS, SRVHH:SPIS, TQVQL:SPIS, VPTEL:EPIS,
VPTKM:EPIS, VPTKL:EPIS, VPTQL:EPIS, VPTRL:EPIS,
VPTKT:EPIS, VPTAL:EPIS, VPTDL:EPIS, VPEKM:EPIS,
APTKL:EPIS, APTQL:EPIS, TPTKM:EPIS, VPARL:EPIS,
APVKT:EPIS, VPQAL:EPIS, VSQDL:EPIS, VPQDL:EPIS,
SRVHH:EPIS, TQVQL:EPIS, TPTEL:SPIN, TPTKM:SPIN,
TPTKL:SPIN, TPTQL:SPIN, TPTRL:SPIN, TPTKT:SPIN,
TPTAL:SPIN, TPTDL:SPIN, VPTEL:SPIN, VPEKM:SPIN,
APTKL:SPIN, APTQL:SPIN, VPTKL:SPIN, VPARL:SPIN,
VPTRL:SPIN, APVKT:SPIN, VPQAL:SPIN, VSQDL:SPIN,
VPQDL:SPIN, VPTEE:SPIN, VPTGQ:SPIN, SRVHH:SPIN,
TQVQL:SPIN, VPAEL:SPIS, VPAKM:SPIS, VPAKL:SPIS,
VPAQL:SPIS, VPAKT:SPIS, VPAAL:SPIS, VPADL:SPIS,
VPTEE:SPIS, VPTGQ:SPIS, APVEL:KPLS, APVKM:KPLS,
APVKL:KPLS, APVQL:KPLS, APVRL:KPLS, APVAL:KPLS,
APVDL:KPLS, VPTEL:KPLS, VPEKM:KPLS, APTKL:KPLS,
APTQL:KPLS, VPTKL:KPLS, TPTKM:KPLS, VPARL:KPLS,
VPTRL:KPLS, VPQAL:KPLS, VSQDL:KPLS, VPQDL:KPLS,
VPTEE:KPLS, VPTGQ:KPLS, SRVHH:KPLS, TQVQL:KPLS,
VPQEL:EPLP, VPQKM:EPLP, VPQKL:EPLP, VPQQL:EPLP,
VPQRL:EPLP, VPQKT:EPLP, VPQDL:EPLP, VPTEL:EPLP,
VPEKM:EPLP, APTKL:EPLP, APTQL:EPLP, VPTKL:EPLP,
TPTKM:EPLP, VPARL:EPLP, VPTRL:EPLP, APVKT:EPLP,
VSQDL:EPLP, VPTEE:EPLP, VPTGQ:EPLP, SRVHH:EPLP,
TQVQL:EPLP, VSQEL:EPLT, VSQKM:EPLT, VSQKL:EPLT,
VSQQL:EPLT, VSQRL:EPLT, VSQKT:EPLT, VSQAL:EPLT,
VSQDL:EPLT, VPTEL:EPLT, VPEKM:EPLT, APTKL:EPLT,
APTQL:EPLT, VPTKL:EPLT, TPTKM:EPLT, VPARL:EPLT,
VPTRL:EPLT, APVKT:EPLT, VPQAL:EPLT, VPTEE:EPLT,
VPTGQ:EPLT, SRVHH:EPLT, TQVQL:EPLT, VPQEL:EPLT,
VPQKM:EPLT, VPQKL:EPLT, VPQQL:EPLT, VPQRL:EPLT,
VPQKT:EPLT, VPQDL:EPLT, VPTGQ:SNIT, VPEKM:SNIT,
APTKL:SNIT, APTQL:SNIT, TPTKM:SNIT, VPARL:SNIT,
APVKT:SNIT, VPQAL:SNIT, VSQDL:SNIT, VPQDL:SNIT,
SRVHH:SNIT, TQVQL:SNIT, SRVQL:RSVK, VPTEL:RSVK,
VPEKM:RSVK, APTKL:RSVK, APTQL:RSVK, VPTKL:RSVK,
TPTKM:RSVK, VPARL:RSVK, VPTRL:RSVK, APVKT:RSVK,
VPQAL:RSVK, VSQDL:RSVK, VPQDL:RSVK, VPTEE:RSVK,
VPTGQ:RSVK, TQVQL:RSVK, TQVHH:RPVQ, VPTEL:RPVQ,
VPEKM:RPVQ, APTKL:RPVQ, APTQL:RPVQ, VPTKL:RPVQ,
TPTKM:RPVQ, VPARL:RPVQ, VPTRL:RPVQ, APVKT:RPVQ,
VPQAL:RPVQ, VSQDL:RPVQ, VPQDL:RPVQ, VPTEE:RPVQ,
VPTGQ:RPVQ
and
SRVHH:RPVQ.

[0318] In particular, in certain embodiments, the pair PEP7:PEP1 is selected from the group consisting of

GIPEPXX:SAIS, HVTKPTX:SAIS, YVPKPXX:SAIS,
TVPKPXX:SAIS, AVPKAXX:SAIS, KVGKAXX:SAIS,
KASKAXX:SAIS, GSAGPXX:SAIS, AAPASXX:SAIS,
STPPTXX:SAIS, HVPKPXX:SAIS, RVPSTXX:SAIS,
ASAAPXX:SAIS, ASASPXX:SAIS, SSVKXQP:SAIS,
RNVQXRP:SAIS, KIPKAXX:SSLS, SIPKAXX:SSLS,
HVTKPTX:SSLS, YVPKPXX:SSLS, TVPKPXX:SSLS,
AVPKAXX:SSLS, KVGKAXX:SSLS, KASKAXX:SSLS,
GSAGPXX:SSLS, AAPASXX:SSLS, STPPTXX:SSLS,
HVPKPXX:SSLS, RVPSTXX:SSLS, ASAAPXX:SSLS,
ASASPXX:SSLS, NDEGLEX:SSLS, SSVKXQP:SSLS,
RNVQXRP:SSLS, KIPKAXX:NAIS, GIPEPXX:NAIS,
SIPKAXX:NAIS, AVPKAXX:NAIS, KVGKAXX:NAIS,
KASKAXX:NAIS, GSAGPXX:NAIS, AAPASXX:NAIS,
STPPTXX:NAIS, RVPSTXX:NAIS, ASAAPXX:NAIS,
ASASPXX:NAIS, NDEGLEX:NAIS, SSVKXQP:NAIS,
RNVQXRP:NAIS, KIPKAXX:SATS, GIPEPXX:SATS,
SIPKAXX:SATS, HVTKPTX:SATS, YVPKPXX:SATS,
TVPKPXX:SATS, KVGKAXX:SATS, KASKAXX:SATS,
GSAGPXX:SATS, AAPASXX:SATS, STPPTXX:SATS,
HVPKPXX:SATS, RVPSTXX:SATS, ASAAPXX:SATS,
ASASPXX:SATS, NDEGLEX:SATS, SSVKXQP:SATS,
RNVQXRP:SATS, KIPKAXX:SPIS, GIPEPXX:SPIS,
SIPKAXX:SPIS, HVTKPTX:SPIS, YVPKPXX:SPIS,
TVPKPXX:SPIS, AVPKAXX:SPIS, KASKAXX:SPIS,
GSAGPXX:SPIS, AAPASXX:SPIS, STPPTXX:SPIS,
HVPKPXX:SPIS, RVPSTXX:SPIS, ASAAPXX:SPIS,
ASASPXX:SPIS, SSVKXQP:SPIS, RNVQXRP:SPIS,
KIPKAXX:EPIS, GIPEPXX:EPIS, SIPKAXX:EPIS,
HVTKPTX:EPIS, YVPKPXX:EPIS, TVPKPXX:EPIS,
AVPKAXX:EPIS, KVGKAXX:EPIS, GSAGPXX:EPIS,
AAPASXX:EPIS, STPPTXX:EPIS, HVPKPXX:EPIS,
RVPSTXX:EPIS, ASAAPXX:EPIS, ASASPXX:EPIS,
SSVKXQP:EPIS, RNVQXRP:EPIS, KIPKAXX:SPIN,
GIPEPXX:SPIN, SIPKAXX:SPIN, HVTKPTX:SPIN,
YVPKPXX:SPIN, TVPKPXX:SPIN, AVPKAXX:SPIN,
KVGKAXX:SPIN, KASKAXX:SPIN, AAPASXX:SPIN,
STPPTXX:SPIN, HVPKPXX:SPIN, RVPSTXX:SPIN,
ASAAPXX:SPIN, ASASPXX:SPIN, NDEGLEX:SPIN,
SSVKXQP:SPIN, RNVQXRP:SPIN, KVGKAXX:SPIS,
NDEGLEX:SPIS, KIPKAXX:KPLS, GIPEPXX:KPLS,
SIPKAXX:KPLS, HVTKPTX:KPLS, YVPKPXX:KPLS,
TVPKPXX:KPLS, AVPKAXX:KPLS, KVGKAXX:KPLS,
KASKAXX:KPLS, GSAGPXX:KPLS, AAPASXX:KPLS,
STPPTXX:KPLS, HVPKPXX:KPLS, ASAAPXX:KPLS,
ASASPXX:KPLS, NDEGLEX:KPLS, SSVKXQP:KPLS,
RNVQXRP:KPLS, KIPKAXX:EPLP, GIPEPXX:EPLP,
SIPKAXX:EPLP, HVTKPTX:EPLP, YVPKPXX:EPLP,
TVPKPXX:EPLP, AVPKAXX:EPLP, KVGKAXX:EPLP,
KASKAXX:EPLP, GSAGPXX:EPLP, AAPASXX:EPLP,
STPPTXX:EPLP, HVPKPXX:EPLP, RVPSTXX:EPLP,
ASASPXX:EPLP, NDEGLEX:EPLP, SSVKXQP:EPLP,
RNVQXRP:EPLP, KIPKAXX:EPLT, GIPEPXX:EPLT,
SIPKAXX:EPLT, HVTKPTX:EPLT, YVPKPXX:EPLT,
TVPKPXX:EPLT, AVPKAXX:EPLT, KVGKAXX:EPLT,
KASKAXX:EPLT, GSAGPXX:EPLT, AAPASXX:EPLT,
STPPTXX:EPLT, HVPKPXX:EPLT, RVPSTXX:EPLT,
ASAAPXX:EPLT, ASASPXX:EPLT, NDEGLEX:EPLT,
SSVKXQP:EPLT, RNVQXRP:EPLT, NDEGLEX:SNIT,
GIPEPXX:SNIT, HVTKPTX:SNIT, YVPKPXX:SNIT,
TVPKPXX:SNIT, AVPKAXX:SNIT, GSAGPXX:SNIT,
AAPASXX:SNIT, HVPKPXX:SNIT, RVPSTXX:SNIT,
ASAAPXX:SNIT, ASASPXX:SNIT, SSVKXQP:SNIT,
RNVQXRP:SNIT, RNVQXRP:RSVK, KIPKAXX:RSVK,
GIPEPXX:RSVK, SIPKAXX:RSVK, HVTKPTX:RSVK,
YVPKPXX:RSVK, TVPKPXX:RSVK, AVPKAXX:RSVK,
KVGKAXX:RSVK, KASKAXX:RSVK, GSAGPXX:RSVK,
AAPASXX:RSVK, STPPTXX:RSVK, HVPKPXX:RSVK,
RVPSTXX:RSVK, ASAAPXX:RSVK, ASASPXX:RSVK,
NDEGLEX:RSVK, SSVKXQP:RPVQ, KIPKAXX:RPVQ,
GIPEPXX:RPVQ, SIPKAXX:RPVQ, HVTKPTX:RPVQ,
YVPKPXX:RPVQ, TVPKPXX:RPVQ, AVPKAXX:RPVQ,
KVGKAXX:RPVQ, KASKAXX:RPVQ, GSAGPXX:RPVQ,
AAPASXX:RPVQ, STPPTXX:RPVQ, HVPKPXX:RPVQ,
RVPSTXX:RPVQ, ASAAPXX:RPVQ, ASASPXX:RPVQ
and
NDEGLEX:RPVQ.

[0319] In particular, in certain embodiments, the pair PEP9:PEP1 is selected from the group consisting of

GIPEPXXVPTKM:SAIS, HVTKPTXVPTKL:SAIS,
YVPKPXXVPTKL:SAIS, TVPKPXXVPTQL:SAIS,
AVPKAXXVPTKL:SAIS, KVGKAXXVPTKL:SAIS,
KASKAXXVPTKL:SAIS, GSAGPXXVPTKM:SAIS,
AAPASXXVPTRL:SAIS, STPPTXXVPTRL:SAIS,
HVPKPXXVPTKL:SAIS, RVPSTXXVPTKT:SAIS,
ASAAPXXVPTAL:SAIS, ASASPXXVPTDL:SAIS,
GIPEPXXVPEKM:SAIS, HVTKPTXAPTKL:SAIS,
YVPKPXXAPTKL:SAIS, TVPKPXXAPTQL:SAIS,
AVPKAXXAPTKL:SAIS, GSAGPXXTPTKM:SAIS,
AAPASXXVPARL:SAIS, HVPKPXXAPTKL:SAIS,
RVPSTXXAPVKT:SAIS, ASAAPXXVPQAL:SAIS,
ASASPXXVSQDL:SAIS, ASASPXXVPQDL:SAIS,
SSVKXQPSRVHH:SAIS, RNVQXRPTQVQL:SAIS,
KIPKAXXVPEEL:SSLS, SIPKAXXVPEEL:SSLS,
HVTKPTXVPEKL:SSLS, YVPKPXXVPEKL:SSLS,
TVPKPXXVPEQL:SSLS, AVPKAXXVPEKL:SSLS,
KVGKAXXVPEKL:SSLS, KASKAXXVPEKL:SSLS,
GSAGPXXVPEKM:SSLS, AAPASXXVPERL:SSLS,
STPPTXXVPERL:SSLS, HVPKPXXVPEKL:SSLS,
RVPSTXXVPEKT:SSLS, ASAAPXXVPEAL:SSLS,
ASASPXXVPEDL:SSLS, KIPKAXXVPTEL:SSLS,
SIPKAXXVPTEL:SSLS, HVTKPTXAPTKL:SSLS,
YVPKPXXAPTKL:SSLS, TVPKPXXAPTQL:SSLS,
AVPKAXXAPTKL:SSLS, KVGKAXXVPTKL:SSLS,
KASKAXXVPTKL:SSLS, GSAGPXXTPTKM:SSLS,
AAPASXXVPARL:SSLS, STPPTXXVPTRL:SSLS,
HVPKPXXAPTKL:SSLS, RVPSTXXAPVKT:SSLS,
ASAAPXXVPQAL:SSLS, ASASPXXVSQDL:SSLS,
ASASPXXVPQDL:SSLS, NDEGLEXVPTEE:SSLS,
NDEGLEXVPTGQ:SSLS, SSVKXQPSRVHH:SSLS,
RNVQXRPTQVQL:SSLS, KIPKAXXAPTEL:NAIS,
GIPEPXXAPTKM:NAIS, SIPKAXXAPTEL:NAIS,
AVPKAXXAPTKL:NAIS, KVGKAXXAPTKL:NAIS,
KASKAXXAPTKL:NAIS, GSAGPXXAPTKM:NAIS,
AAPASXXAPTRL:NAIS, STPPTXXAPTRL:NAIS,
RVPSTXXAPTKT:NAIS, ASAAPXXAPTAL:NAIS,
ASASPXXAPTDL:NAIS, KIPKAXXVPTEL:NAIS,
GIPEPXXVPEKM:NAIS, SIPKAXXVPTEL:NAIS,
KVGKAXXVPTKL:NAIS, KASKAXXVPTKL:NAIS,
GSAGPXXTPTKM:NAIS, AAPASXXVPARL:NAIS,
STPPTXXVPTRL:NAIS, RVPSTXXAPVKT:NAIS,
ASAAPXXVPQAL:NAIS, ASASPXXVSQDL:NAIS,
ASASPXXVPQDL:NAIS, NDEGLEXVPTEE:NAIS,
NDEGLEXVPTGQ:NAIS, SSVKXQPSRVHH:NAIS,
RNVQXRPTQVQL:NAIS, KIPKAXXAPTEL:SATS,
GIPEPXXAPTKM:SATS, SIPKAXXAPTEL:SATS,
HVTKPTXAPTKL:SATS, YVPKPXXAPTKL:SATS,
TVPKPXXAPTQL:SATS, KVGKAXXAPTKL:SATS,
KASKAXXAPTKL:SATS, GSAGPXXAPTKM:SATS,
AAPASXXAPTRL:SATS, STPPTXXAPTRL:SATS,
HVPKPXXAPTKL:SATS, RVPSTXXAPTKT:SATS,
ASAAPXXAPTAL:SATS, ASASPXXAPTDL:SATS,
KIPKAXXVPTEL:SATS, GIPEPXXVPEKM:SATS,
SIPKAXXVPTEL:SATS, KVGKAXXVPTKL:SATS,
KASKAXXVPTKL:SATS, GSAGPXXTPTKM:SATS,
AAPASXXVPARL:SATS, STPPTXXVPTRL:SATS,
RVPSTXXAPVKT:SATS, ASAAPXXVPQAL:SATS,
ASASPXXVSQDL:SATS, ASASPXXVPQDL:SATS,
NDEGLEXVPTEE:SATS, NDEGLEXVPTGQ:SATS,
SSVKXQPSRVHH:SATS, RNVQXRPTQVQL:SATS,
KIPKAXXVPTEL:SPIS, GIPEPXXVPTKM:SPIS,
SIPKAXXVPTEL:SPIS, HVTKPTXVPTKL:SPIS,
YVPKPXXVPTKL:SPIS, TVPKPXXVPTQL:SPIS,
AVPKAXXVPTKL:SPIS, KASKAXXVPTKL:SPIS,
GSAGPXXVPTKM:SPIS, AAPASXXVPTRL:SPIS,
STPPTXXVPTRL:SPIS, HVPKPXXVPTKL:SPIS,
RVPSTXXVPTKT:SPIS, ASAAPXXVPTAL:SPIS,
ASASPXXVPTDL:SPIS, GIPEPXXVPEKM:SPIS,
HVTKPTXAPTKL:SPIS, YVPKPXXAPTKL:SPIS,
TVPKPXXAPTQL:SPIS, AVPKAXXAPTKL:SPIS,
GSAGPXXTPTKM:SPIS, AAPASXXVPARL:SPIS,
HVPKPXXAPTKL:SPIS, RVPSTXXAPVKT:SPIS,
ASAAPXXVPQAL:SPIS, ASASPXXVSQDL:SPIS,
ASASPXXVPQDL:SPIS, SSVKXQPSRVHH:SPIS,
RNVQXRPTQVQL:SPIS, KIPKAXXVPTEL:EPIS,
GIPEPXXVPTKM:EPIS, SIPKAXXVPTEL:EPIS,
HVTKPTXVPTKL:EPIS, YVPKPXXVPTKL:EPIS,
TVPKPXXVPTQL:EPIS, AVPKAXXVPTKL:EPIS,
KVGKAXXVPTKL:EPIS, GSAGPXXVPTKM:EPIS,
AAPASXXVPTRL:EPIS, STPPTXXVPTRL:EPIS,
HVPKPXXVPTKL:EPIS, RVPSTXXVPTKT:EPIS,
ASAAPXXVPTAL:EPIS, ASASPXXVPTDL:EPIS,
GIPEPXXVPEKM:EPIS, HVTKPTXAPTKL:EPIS,
YVPKPXXAPTKL:EPIS, TVPKPXXAPTQL:EPIS,
AVPKAXXAPTKL:EPIS, GSAGPXXTPTKM:EPIS,
AAPASXXVPARL:EPIS, HVPKPXXAPTKL:EPIS,
RVPSTXXAPVKT:EPIS, ASAAPXXVPQAL:EPIS,
ASASPXXVSQDL:EPIS, ASASPXXVPQDL:EPIS,
SSVKXQPSRVHH:EPIS, RNVQXRPTQVQL:EPIS,
KIPKAXXTPTEL:SPIN, GIPEPXXTPTKM:SPIN,
SIPKAXXTPTEL:SPIN, HVTKPTXTPTKL:SPIN,
YVPKPXXTPTKL:SPIN, TVPKPXXTPTQL:SPIN,
AVPKAXXTPTKL:SPIN, KVGKAXXTPTKL:SPIN,
KASKAXXTPTKL:SPIN, AAPASXXTPTRL:SPIN,
STPPTXXTPTRL:SPIN, HVPKPXXTPTKL:SPIN,
RVPSTXXTPTKT:SPIN, ASAAPXXTPTAL:SPIN,
ASASPXXTPTDL:SPIN, KIPKAXXVPTEL:SPIN,
GIPEPXXVPEKM:SPIN, SIPKAXXVPTEL:SPIN,
HVTKPTXAPTKL:SPIN, YVPKPXXAPTKL:SPIN,
TVPKPXXAPTQL:SPIN, AVPKAXXAPTKL:SPIN,
KVGKAXXVPTKL:SPIN, KASKAXXVPTKL:SPIN,
AAPASXXVPARL:SPIN, STPPTXXVPTRL:SPIN,
HVPKPXXAPTKL:SPIN, RVPSTXXAPVKT:SPIN,
ASAAPXXVPQAL:SPIN, ASASPXXVSQDL:SPIN,
ASASPXXVPQDL:SPIN, NDEGLEXVPTEE:SPIN,
NDEGLEXVPTGQ:SPIN, SSVKXQPSRVHH:SPIN,
RNVQXRPTQVQL:SPIN, KIPKAXXVPAEL:SPIS,
GIPEPXXVPAKM:SPIS, SIPKAXXVPAEL:SPIS,
HVTKPTXVPAKL:SPIS, YVPKPXXVPAKL:SPIS,
TVPKPXXVPAQL:SPIS, AVPKAXXVPAKL:SPIS,
KVGKAXXVPAKL:SPIS, KASKAXXVPAKL:SPIS,
GSAGPXXVPAKM:SPIS, STPPTXXVPARL:SPIS,
HVPKPXXVPAKL:SPIS, RVPSTXXVPAKT:SPIS,
ASAAPXXVPAAL:SPIS, ASASPXXVPADL:SPIS,
KVGKAXXVPTKL:SPIS, NDEGLEXVPTEE:SPIS,
NDEGLEXVPTGQ:SPIS, KIPKAXXAPVEL:KPLS,
GIPEPXXAPVKM:KPLS, SIPKAXXAPVEL:KPLS,
HVTKPTXAPVKL:KPLS, YVPKPXXAPVKL:KPLS,
TVPKPXXAPVQL:KPLS, AVPKAXXAPVKL:KPLS,
KVGKAXXAPVKL:KPLS, KASKAXXAPVKL:KPLS,
GSAGPXXAPVKM:KPLS, AAPASXXAPVRL:KPLS,
STPPTXXAPVRL:KPLS, HVPKPXXAPVKL:KPLS,
ASAAPXXAPVAL:KPLS, ASASPXXAPVDL:KPLS,
KIPKAXXVPTEL:KPLS, GIPEPXXVPEKM:KPLS,
SIPKAXXVPTEL:KPLS, HVTKPTXAPTKL:KPLS,
YVPKPXXAPTKL:KPLS, TVPKPXXAPTQL:KPLS,
AVPKAXXAPTKL:KPLS, KVGKAXXVPTKL:KPLS,
KASKAXXVPTKL:KPLS, GSAGPXXTPTKM:KPLS,
AAPASXXVPARL:KPLS, STPPTXXVPTRL:KPLS,
HVPKPXXAPTKL:KPLS, ASAAPXXVPQAL:KPLS,
ASASPXXVSQDL:KPLS, ASASPXXVPQDL:KPLS,
NDEGLEXVPTEE:KPLS, NDEGLEXVPTGQ:KPLS,
SSVKXQPSRVHH:KPLS, RNVQXRPTQVQL:KPLS,
KIPKAXXVPQEL:EPLP, GIPEPXXVPQKM:EPLP,
SIPKAXXVPQEL:EPLP, HVTKPTXVPQKL:EPLP,
YVPKPXXVPQKL:EPLP, TVPKPXXVPQQL:EPLP,
AVPKAXXVPQKL:EPLP, KVGKAXXVPQKL:EPLP,
KASKAXXVPQKL:EPLP, GSAGPXXVPQKM:EPLP,
AAPASXXVPQRL:EPLP, STPPTXXVPQRL:EPLP,
HVPKPXXVPQKL:EPLP, RVPSTXXVPQKT:EPLP,
ASASPXXVPQDL:EPLP, KIPKAXXVPTEL:EPLP,
GIPEPXXVPEKM:EPLP, SIPKAXXVPTEL:EPLP,
HVTKPTXAPTKL:EPLP, YVPKPXXAPTKL:EPLP,
TVPKPXXAPTQL:EPLP, AVPKAXXAPTKL:EPLP,
KVGKAXXVPTKL:EPLP, KASKAXXVPTKL:EPLP,
GSAGPXXTPTKM:EPLP, AAPASXXVPARL:EPLP,
STPPTXXVPTRL:EPLP, HVPKPXXAPTKL:EPLP,
RVPSTXXAPVKT:EPLP, ASASPXXVSQDL:EPLP,
NDEGLEXVPTEE:EPLP, NDEGLEXVPTGQ:EPLP,
SSVKXQPSRVHH:EPLP, RNVQXRPTQVQL:EPLP,
KIPKAXXVSQEL:EPLT, GIPEPXXVSQKM:EPLT,
SIPKAXXVSQEL:EPLT, HVTKPTXVSQKL:EPLT,
YVPKPXXVSQKL:EPLT, TVPKPXXVSQQL:EPLT,
AVPKAXXVSQKL:EPLT, KVGKAXXVSQKL:EPLT,
KASKAXXVSQKL:EPLT, GSAGPXXVSQKM:EPLT,
AAPASXXVSQRL:EPLT, STPPTXXVSQRL:EPLT,
HVPKPXXVSQKL:EPLT, RVPSTXXVSQKT:EPLT,
ASAAPXXVSQAL:EPLT, ASASPXXVSQDL:EPLT,
KIPKAXXVPTEL:EPLT, GIPEPXXVPEKM:EPLT,
SIPKAXXVPTEL:EPLT, HVTKPTXAPTKL:EPLT,
YVPKPXXAPTKL:EPLT, TVPKPXXAPTQL:EPLT,
AVPKAXXAPTKL:EPLT, KVGKAXXVPTKL:EPLT,
KASKAXXVPTKL:EPLT, GSAGPXXTPTKM:EPLT,
AAPASXXVPARL:EPLT, STPPTXXVPTRL:EPLT,
HVPKPXXAPTKL:EPLT, RVPSTXXAPVKT:EPLT,
ASAAPXXVPQAL:EPLT, NDEGLEXVPTEE:EPLT,
NDEGLEXVPTGQ:EPLT, SSVKXQPSRVHH:EPLT,
RNVQXRPTQVQL:EPLT, KIPKAXXVPQEL:EPLT,
GIPEPXXVPQKM:EPLT, SIPKAXXVPQEL:EPLT,
HVTKPTXVPQKL:EPLT, YVPKPXXVPQKL:EPLT,
TVPKPXXVPQQL:EPLT, AVPKAXXVPQKL:EPLT,
KVGKAXXVPQKL:EPLT, KASKAXXVPQKL:EPLT,
GSAGPXXVPQKM:EPLT, AAPASXXVPQRL:EPLT,
STPPTXXVPQRL:EPLT, HVPKPXXVPQKL:EPLT,
RVPSTXXVPQKT:EPLT, ASASPXXVPQDL:EPLT,
NDEGLEXVPTGQ:SNIT, GIPEPXXVPEKM:SNIT,
HVTKPTXAPTKL:SNIT, YVPKPXXAPTKL:SNIT,
TVPKPXXAPTQL:SNIT, AVPKAXXAPTKL:SNIT,
GSAGPXXTPTKM:SNIT, AAPASXXVPARL:SNIT,
HVPKPXXAPTKL:SNIT, RVPSTXXAPVKT:SNIT,
ASAAPXXVPQAL:SNIT, ASASPXXVSQDL:SNIT,
ASASPXXVPQDL:SNIT, SSVKXQPSRVHH:SNIT,
RNVQXRPTQVQL:SNIT, RNVQXRPSRVQL:RSVK,
KIPKAXXVPTEL:RSVK, GIPEPXXVPEKM:RSVK,
SIPKAXXVPTEL:RSVK, HVTKPTXAPTKL:RSVK,
YVPKPXXAPTKL:RSVK, TVPKPXXAPTQL:RSVK,
AVPKAXXAPTKL:RSVK, KVGKAXXVPTKL:RSVK,
KASKAXXVPTKL:RSVK, GSAGPXXTPTKM:RSVK,
AAPASXXVPARL:RSVK, STPPTXXVPTRL:RSVK,
HVPKPXXAPTKL:RSVK, RVPSTXXAPVKT:RSVK,
ASAAPXXVPQAL:RSVK, ASASPXXVSQDL:RSVK,
ASASPXXVPQDL:RSVK, NDEGLEXVPTEE:RSVK,
NDEGLEXVPTGQ:RSVK, RNVQXRPTQVQL:RSVK,
SSVKXQPTQVHH:RPVQ, KIPKAXXVPTEL:RPVQ,
GIPEPXXVPEKM:RPVQ, SIPKAXXVPTEL:RPVQ,
HVTKPTXAPTKL:RPVQ, YVPKPXXAPTKL:RPVQ,
TVPKPXXAPTQL:RPVQ, AVPKAXXAPTKL:RPVQ,
KVGKAXXVPTKL:RPVQ, KASKAXXVPTKL:RPVQ,
GSAGPXXTPTKM:RPVQ, AAPASXXVPARL:RPVQ,
STPPTXXVPTRL:RPVQ, HVPKPXXAPTKL:RPVQ,
RVPSTXXAPVKT:RPVQ, ASAAPXXVPQAL:RPVQ,
ASASPXXVSQDL:RPVQ, ASASPXXVPQDL:RPVQ,
NDEGLEXVPTEE:RPVQ, NDEGLEXVPTGQ:RPVQ
and
SSVKXQPSRVHH:RPVQ.

[0320] In particular, in certain embodiments, the pair PEP3:PEP12 is selected from the group consisting of VPT:SAIS-AA¹⁷-LYL, VPE:SAIS-AA¹⁷-LYL, APT:SAIS-AA¹⁷-LYL, TPT:SAIS-AA¹⁷-LYL, VPA:SAIS-AA¹⁷-LYL, APV:SAIS-AA¹⁷-LYL, VPQ:SAIS-AA¹⁷-LYL, VSQ:SAIS-AA¹⁷-LYL, SRV:SAIS-AA¹⁷-LYL, TQV:SAIS-AA¹⁷-LYL, VPE:SSLS-AA¹⁷-LFF, VPT:SSLS-AA¹⁷-LFF, APT:SSLS-AA¹⁷-LFF, TPT:SSLS-AA¹⁷-LFF, VPA:SSLS-AA¹⁷-LFF, APV:SSLS-AA¹⁷-LFF, VPQ:SSLS-AA¹⁷-LFF, VSQ:SSLS-AA¹⁷-LFF, SRV:SSLS-AA¹⁷-LFF, TQV:SSLS-AA¹⁷-LFF, APT:NAIS-AA¹⁷-LYF, VPT:NAIS-AA¹⁷-LYF, VPE:NAIS-AA¹⁷-LYF, TPT:NAIS-AA¹⁷-LYF, VPA:NAIS-AA¹⁷-LYF, APV:NAIS-AA¹⁷-LYF, VPQ:NAIS-AA¹⁷-LYF, VSQ:NAIS-AA¹⁷-LYF, SRV:NAIS-AA¹⁷-LYF, TQV:NAIS-AA¹⁷-LYF, APT:SATS-AA¹⁷-LYY, VPT:SATS-AA¹⁷-LYY, VPE:SATS-AA¹⁷-LYY, TPT:SATS-AA¹⁷-LYY, VPA:SATS-AA¹⁷-LYY, APV:SATS-AA¹⁷-LYY, VPQ:SATS-AA¹⁷-LYY, VSQ:SATS-AA¹⁷-LYY, SRV:SATS-AA¹⁷-LYY, TQV:SATS-AA¹⁷-LYY, VPT:SPIS-AA¹⁷-LYK, VPE:SPIS-AA¹⁷-LYK, APT:SPIS-AA¹⁷-LYK, TPT:SPIS-AA¹⁷-LYK, VPA:SPIS-AA¹⁷-LYK, APV:SPIS-AA¹⁷-LYK, VPQ:SPIS-AA¹⁷-LYK, VSQ:SPIS-AA¹⁷-LYK, SRV:SPIS-AA¹⁷-LYK, TQV:SPIS-AA¹⁷-LYK, VPT:EPIS-AA¹⁷-LYL, VPE:EPIS-AA¹⁷-LYL, APT:EPIS-AA¹⁷-LYL, TPT:EPIS-AA¹⁷-LYL, VPA:EPIS-AA¹⁷-LYL, APV:EPIS-AA¹⁷-LYL, VPQ:EPIS-AA¹⁷-LYL, VSQ:EPIS-AA¹⁷-LYL, SRV:EPIS-AA¹⁷-LYL, TQV:EPIS-AA¹⁷-LYL, TPT:SPIN-AA¹⁷-LYF, VPT:SPIN-AA¹⁷-LYF, VPE:SPIN-AA¹⁷-LYF, APT:SPIN-AA¹⁷-LYF, VPA:SPIN-AA¹⁷-LYF, APV:SPIN-AA¹⁷-LYF, VPQ:SPIN-AA¹⁷-LYF, VSQ:SPIN-AA¹⁷-LYF, SRV:SPIN-AA¹⁷-LYF, TQV:SPIN-AA¹⁷-LYF, VPA:SPIS-AA¹⁷-LYI, VPT:SPIS-AA¹⁷-LYI, VPE:SPIS-AA¹⁷-LYI, APT:SPIS-AA¹⁷-LYI, TPT:SPIS-AA¹⁷-LYI, APV:SPIS-AA¹⁷-LYI, VPQ:SPIS-AA¹⁷-LYI, VSQ:SPIS-AA¹⁷-LYI, SRV:SPIS-AA¹⁷-LYI, TQV:SPIS-AA¹⁷-LYI, VPT:SPIS-AA¹⁷-LFI, VPE:SPIS-AA¹⁷-LFI, APT:SPIS-AA¹⁷-LFI, TPT:SPIS-AA¹⁷-LFI, VPA:SPIS-AA¹⁷-LFI, APV:SPIS-AA¹⁷-LFI, VPQ:SPIS-AA¹⁷-LFI, VSQ:SPIS-AA¹⁷-LFI, SRV:SPIS-AA¹⁷-LFI, TQV:SPIS-AA¹⁷-LFI, APV:KPLS-AA¹⁷-LYV, VPT:KPLS-AA¹⁷-LYV, VPE:KPLS-AA¹⁷-LYV, APT:KPLS-AA¹⁷-LYV, TPT:KPLS-AA¹⁷-LYV, VPA:KPLS-AA¹⁷-LYV, VPQ:KPLS-AA¹⁷-LYV, VSQ:KPLS-AA¹⁷-LYV, SRV:KPLS-AA¹⁷-LYV, TQV:KPLS-AA¹⁷-LYV, VPQ:EPLP-AA¹⁷-VYY, VPT:EPLP-AA¹⁷-VYY, VPE:EPLP-AA¹⁷-VYY, APT:EPLP-AA¹⁷-VYY, TPT:EPLP-AA¹⁷-VYY, VPA:EPLP-AA¹⁷-VYY, APV:EPLP-AA¹⁷-VYY, VSQ:EPLP-AA¹⁷-VYY, SRV:EPLP-AA¹⁷-VYY, TQV:EPLP-AA¹⁷-VYY, VSQ:EPLT-AA¹⁷-LYY, VPT:EPLT-AA¹⁷-LYY, VPE:EPLT-AA¹⁷-LYY, APT:EPLT-AA¹⁷-LYY, TPT:EPLT-AA¹⁷-LYY, VPA:EPLT-AA¹⁷-LYY, APV:EPLT-AA¹⁷-LYY, VPQ:EPLT-AA¹⁷-LYY, SRV:EPLT-AA¹⁷-LYY, TQV:EPLT-AA¹⁷-LYY, VPT:SNIT-AA¹⁷-QIM, VPE:SNIT-AA¹⁷-QIM, APT:SNIT-AA¹⁷-QIM, TPT:SNIT-AA¹⁷-QIM, VPA:SNIT-AA¹⁷-QIM, APV:SNIT-AA¹⁷-QIM, VPQ:SNIT-AA¹⁷-QIM, VSQ:SNIT-AA¹⁷-QIM, SRV:SNIT-AA¹⁷-QIM, TQV:SNIT-AA¹⁷-QIM, SRV:RSVK-AA¹⁷-AKV, VPT:RSVK-AA¹⁷-AKV, VPE:RSVK-AA¹⁷-AKV, APT:RSVK-AA¹⁷-AKV, TPT:RSVK-AA¹⁷-AKV, VPA:RSVK-AA¹⁷-AKV, APV:RSVK-AA¹⁷-AKV, VPQ:RSVK-AA¹⁷-AKV, VSQ:RSVK-AA¹⁷-AKV, TQV:RSVK-AA¹⁷-AKV, TQV:RPVQ-AA¹⁷-RKI, VPT:RPVQ-AA¹⁷-RKI, VPE:RPVQ-AA¹⁷-RKI, APT:RPVQ-AA¹⁷-RKI, TPT:RPVQ-AA¹⁷-RKI, VPA:RPVQ-AA¹⁷-RKI, APV:RPVQ-AA¹⁷-RKI, VPQ:RPVQ-AA¹⁷-RKI, VSQ:RPVQ-AA¹⁷-RKI and SRV:RPVQ-AA¹⁷-RKI; and wherein AA¹⁷ is selected from the group consisting of G, A, V, L, I, P, F, M, W, T and S (in particular is selected from the group consisting of M, I, L, V and T).

[0321] In particular, in certain embodiments, the pair PEP12:PEP5 is selected from the group consisting of VPTKM:SAIS-AA¹⁷-LYL, VPTKL:SAIS-AA¹⁷-LYL, VPTQL:SAIS-AA¹⁷-LYL, VPTRL:SAIS-AA¹⁷-LYL, VPTKT:SAIS-AA¹⁷-LYL, VPTAL:SAIS-AA¹⁷-LYL, VPTDL:SAIS-AA¹⁷-LYL, VPEKM:SAIS-AA¹⁷-LYL, APTKL:SAIS-AA¹⁷-LYL, APTQL:SAIS-AA¹⁷-LYL, TPTKM:SAIS-AA¹⁷-LYL, VPARL:SAIS-AA¹⁷-LYL, APVKT:SAIS-AA¹⁷-LYL, VPQAL:SAIS-AA¹⁷-LYL, VSQDL:SAIS-AA¹⁷-LYL, VPQDL:SAIS-AA¹⁷-LYL, SRVHH:SAIS-AA¹⁷-LYL, TQVQL:SAIS-AA¹⁷-LYL, VPEEL:SSLS-AA¹⁷-LFF, VPEKL:SSLS-AA¹⁷-LFF, VPEQL:SSLS-AA¹⁷-LFF, VPEKM:SSLS-AA¹⁷-LFF, VPERL:SSLS-AA¹⁷-LFF, VPEKT:SSLS-AA¹⁷-LFF, VPEAL:SSLS-AA¹⁷-LFF, VPEDL:SSLS-AA¹⁷-LFF, VPTEL:SSLS-AA¹⁷-LFF, APTKL:SSLS-AA¹⁷-LFF, APTQL:SSLS-AA¹⁷-LFF, VPTKL:SSLS-AA¹⁷-LFF, TPTKM:SSLS-AA¹⁷-LFF, VPARL:SSLS-AA¹⁷-LFF, VPTRL:SSLS-AA¹⁷-LFF, APVKT:SSLS-AA¹⁷-LFF, VPQAL:SSLS-AA¹⁷-LFF, VSQDL:SSLS-AA¹⁷-LFF, VPQDL:SSLS-AA¹⁷-LFF, VPTEE:SSLS-AA¹⁷-LFF, VPTGQ:SSLS-AA¹⁷-LFF, SRVHH:SSLS-AA¹⁷-LFF, TQVQL:SSLS-AA¹⁷-LFF, APTEL:NAIS-AA¹⁷-LYF, APTKM:NAIS-AA¹⁷-LYF, APTKL:NAIS-AA¹⁷-LYF, APTRL:NAIS-AA¹⁷-LYF, APTKT:NAIS-AA¹⁷-LYF, APTAL:NAIS-AA¹⁷-LYF, APTDL:NAIS-AA¹⁷-LYF, VPTEL:NAIS-AA¹⁷-LYF, VPEKM:NAIS-AA¹⁷-LYF, VPTKL:NAIS-AA¹⁷-LYF, TPTKM:NAIS-AA¹⁷-LYF, VPARL:NAIS-AA¹⁷-LYF, VPTRL:NAIS-AA¹⁷-LYF, APVKT:NAIS-AA¹⁷-LYF, VPQAL:NAIS-AA¹⁷-LYF, VSQDL:NAIS-AA¹⁷-LYF, VPQDL:NAIS-AA¹⁷-LYF, VPTEE:NAIS-AA¹⁷-LYF, VPTGQ:NAIS-AA¹⁷-LYF, SRVHH:NAIS-AA¹⁷-LYF, TQVQL:NAIS-AA¹⁷-LYF, APTEL:SATS-AA¹⁷-LYY, APTKM:SATS-AA¹⁷-LYY, APTKL:SATS-AA¹⁷-LYY, APTQL:SATS-AA¹⁷-LYY, APTRL:SATS-AA¹⁷-LYY, APTKT:SATS-AA¹⁷-LYY, APTAL:SATS-AA¹⁷-LYY, APTDL:SATS-AA¹⁷-LYY, VPTEL:SATS-AA¹⁷-LYY, VPEKM:SATS-AA¹⁷-LYY, VPTKL:SATS-AA¹⁷-LYY, TPTKM:SATS-AA¹⁷-LYY, VPARL:SATS-AA¹⁷-LYY, VPTRL:SATS-AA¹⁷-LYY, APVKT:SATS-AA¹⁷-LYY, VPQAL:SATS-AA¹⁷-LYY, VSQDL:SATS-AA¹⁷-LYY, VPQDL:SATS-AA¹⁷-LYY, VPTEE:SATS-AA¹⁷-LYY, VPTGQ:SATS-AA¹⁷-LYY, SRVHH:SATS-AA¹⁷-LYY, TQVQL:SATS-AA¹⁷-LYY, VPTEL:SPIS-AA¹⁷-LYK, VPTKM:SPIS-AA¹⁷-LYK, VPTKL:SPIS-AA¹⁷-LYK, VPTQL:SPIS-AA¹⁷-LYK, VPTRL:SPIS-AA¹⁷-LYK, VPTKT:SPIS-AA¹⁷-LYK, VPTAL:SPIS-AA¹⁷-LYK, VPTDL:SPIS-AA¹⁷-LYK, VPEKM:SPIS-AA¹⁷-LYK, APTKL:SPIS-AA¹⁷-LYK, APTQL:SPIS-AA¹⁷-LYK, TPTKM:SPIS-AA¹⁷-LYK, VPARL:SPIS-AA¹⁷-LYK, APVKT:SPIS-AA¹⁷-LYK, VPQAL:SPIS-AA¹⁷-LYK, VSQDL:SPIS-AA¹⁷-LYK, VPQDL:SPIS-AA¹⁷-LYK, SRVHH:SPIS-AA¹⁷-LYK, TQVQL:SPIS-AA¹⁷-LYK, VPTEL:EPIS-AA¹⁷-LYL, VPTKM:EPIS-AA¹⁷-LYL, VPTKL:EPIS-AA¹⁷-LYL, VPTQL:EPIS-AA¹⁷-LYL, VPTRL:EPIS-AA¹⁷-LYL, VPTKT:EPIS-AA¹⁷-LYL, VPTAL:EPIS-AA¹⁷-LYL, VPTDL:EPIS-AA¹⁷-LYL, VPEKM:EPIS-AA¹⁷-LYL, APTKL:EPIS-AA¹⁷-LYL, APTQL:EPIS-AA¹⁷-LYL, TPTKM:EPIS-AA¹⁷-LYL, VPARL:EPIS-AA¹⁷-LYL, APVKT:EPIS-AA¹⁷-LYL, VPQAL:EPIS-AA¹⁷-LYL, VSQDL:EPIS-AA¹⁷-LYL, VPQDL:EPIS-AA¹⁷-LYL, SRVHH:EPIS-AA¹⁷-LYL, TQVQL:EPIS-AA¹⁷-LYL, TPTEL:SPIN-AA¹⁷-LYF, TPTKM:SPIN-AA¹⁷-LYF, TPTKL:SPIN-AA¹⁷-LYF, TPTQL:SPIN-AA¹⁷-LYF, TPTRL:SPIN-AA¹⁷-LYF, TPTKT:SPIN-AA¹⁷-LYF, TPTAL:SPIN-AA¹⁷-LYF, TPTDL:SPIN-AA¹⁷-LYF, VPTEL:SPIN-AA¹⁷-LYF, VPEKM:SPIN-AA¹⁷-LYF, APTKL:SPIN-AA¹⁷-LYF, APTQL:SPIN-AA¹⁷-LYF, VPTKL:SPIN-AA¹⁷-LYF, VPARL:SPIN-AA¹⁷-LYF, VPTRL:SPIN-AA¹⁷-LYF, APVKT:SPIN-AA¹⁷-LYF, VPQAL:SPIN-AA¹⁷-LYF, VSQDL:SPIN-AA¹⁷-LYF, VPQDL:SPIN-AA¹⁷-LYF, VPTEE:SPIN-AA¹⁷-LYF, VPTGQ:SPIN-AA¹⁷-LYF, SRVHH:SPIN-AA¹⁷-LYF, TQVQL:SPIN-AA¹⁷-LYF, VPAEL:SPIS-AA¹⁷-LYI, VPAKM:SPIS-AA¹⁷-LYI, VPAKL:SPIS-AA¹⁷-LYI, VPAQL:SPIS-AA¹⁷-LYI, VPARL:SPIS-AA¹⁷-LYI, VPAKT:SPIS-AA¹⁷-LYI, VPAAL:SPIS-AA¹⁷-LYI, VPADL:SPIS-AA¹⁷-LYI, VPTEL:SPIS-AA¹⁷-LYI, VPEKM:SPIS-AA¹⁷-LYI, APTKL:SPIS-AA¹⁷-LYI, APTQL:SPIS-AA¹⁷-LYI, VPTKL:SPIS-AA¹⁷-LYI, TPTKM:SPIS-AA¹⁷-LYI, VPTRL:SPIS-AA¹⁷-LYI, APVKT:SPIS-AA¹⁷-LYI, VPQAL:SPIS-AA¹⁷-LYI, VSQDL:SPIS-AA¹⁷-LYI, VPQDL:SPIS-AA¹⁷-LYI, VPTEE:SPIS-AA¹⁷-LYI, VPTGQ:SPIS-AA¹⁷-LYI, SRVHH:SPIS-AA¹⁷-LYI, TQVQL:SPIS-AA¹⁷-LYI, VPTEL:SPIS-AA¹⁷-LFI, VPTKM:SPIS-AA¹⁷-LFI, VPTKL:SPIS-AA¹⁷-LFI, VPTQL:SPIS-AA¹⁷-LFI, VPTRL:SPIS-AA¹⁷-LFI, VPTKT:SPIS-AA¹⁷-LFI, VPTAL:SPIS-AA¹⁷-LFI, VPTDL:SPIS-AA¹⁷-LFI, VPEKM:SPIS-AA¹⁷-LFI, APTKL:SPIS-AA¹⁷-LFI, APTQL:SPIS-AA¹⁷-LFI, TPTKM:SPIS-AA¹⁷-LFI, VPARL:SPIS-AA¹⁷-LFI, APVKT:SPIS-AA¹⁷-LFI, VPQAL:SPIS-AA¹⁷-LFI, VSQDL:SPIS-AA¹⁷-LFI, VPQDL:SPIS-AA¹⁷-LFI, SRVHH:SPIS-AA¹⁷-LFI, TQVQL:SPIS-AA¹⁷-LFI, APVEL:KPLS-AA¹⁷-LYV, APVKM:KPLS-AA¹⁷-LYV, APVKL:KPLS-AA¹⁷-LYV, APVQL:KPLS-AA¹⁷-LYV, APVRL:KPLS-AA¹⁷-LYV, APVAL:KPLS-AA¹⁷-LYV, APVDL:KPLS-AA¹⁷-LYV, VPTEL:KPLS-AA¹⁷-LYV, VPEKM:KPLS-AA¹⁷-LYV, APTKL:KPLS-AA¹⁷-LYV, APTQL:KPLS-AA¹⁷-LYV, VPTKL:KPLS-AA¹⁷-LYV, TPTKM:KPLS-AA¹⁷-LYV, VPARL:KPLS-AA¹⁷-LYV, VPTRL:KPLS-AA¹⁷-LYV, VPQAL:KPLS-AA¹⁷-LYV, VSQDL:KPLS-AA¹⁷-LYV, VPQDL:KPLS-AA¹⁷-LYV, VPTEE:KPLS-AA¹⁷-LYV, VPTGQ:KPLS-AA¹⁷-LYV, SRVHH:KPLS-AA¹⁷-LYV, TQVQL:KPLS-AA¹⁷-LYV, VPQEL:EPLP-AA¹⁷-VYY, VPQKM:EPLP-AA¹⁷-VYY, VPQKL:EPLP-AA¹⁷-VYY, VPQQL:EPLP-AA¹⁷-VYY, VPQRL:EPLP-AA¹⁷-VYY, VPQKT:EPLP-AA¹⁷-VYY, VPQDL:EPLP-AA¹⁷-VYY, VPTEL:EPLP-AA¹⁷-VYY, VPEKM:EPLP-AA¹⁷-VYY, APTKL:EPLP-AA¹⁷-VYY, APTQL:EPLP-AA¹⁷-VYY, VPTKL:EPLP-AA¹⁷-VYY, TPTKM:EPLP-AA¹⁷-VYY, VPARL:EPLP-AA¹⁷-VYY, VPTRL:EPLP-AA¹⁷-VYY, APVKT:EPLP-AA¹⁷-VYY, VSQDL:EPLP-AA¹⁷-VYY, VPTEE:EPLP-AA¹⁷-VYY, VPTGQ:EPLP-AA¹⁷-VYY, SRVHH:EPLP-AA¹⁷-VYY, TQVQL:EPLP-AA¹⁷-VYY, VSQEL:EPLT-AA¹⁷-LYY, VSQKM:EPLT-AA¹⁷-LYY, VSQKL:EPLT-AA¹⁷-LYY, VSQQL:EPLT-AA¹⁷-LYY, VSQRL:EPLT-AA¹⁷-LYY, VSQKT:EPLT-AA¹⁷-LYY, VSQAL:EPLT-AA¹⁷-LYY, VSQDL:EPLT-AA¹⁷-LYY, VPTEL:EPLT-AA¹⁷-LYY, VPEKM:EPLT-AA¹⁷-LYY, APTKL:EPLT-AA¹⁷-LYY, APTQL:EPLT-AA¹⁷-LYY, VPTKL:EPLT-AA¹⁷-LYY, TPTKM:EPLT-AA¹⁷-LYY, VPARL:EPLT-AA¹⁷-LYY, VPTRL:EPLT-AA¹⁷-LYY, APVKT:EPLT-AA¹⁷-LYY, VPQAL:EPLT-AA¹⁷-LYY, VPTEE:EPLT-AA¹⁷-LYY, VPTGQ:EPLT-AA¹⁷-LYY, SRVHH:EPLT-AA¹⁷-LYY, TQVQL:EPLT-AA¹⁷-LYY, VPQEL:EPLT-AA¹⁷-LYY, VPQKM:EPLT-AA¹⁷-LYY, VPQKL:EPLT-AA¹⁷-LYY, VPQQL:EPLT-AA¹⁷-LYY, VPQRL:EPLT-AA¹⁷-LYY, VPQKT:EPLT-AA¹⁷-LYY, VPQDL:EPLT-AA¹⁷-LYY, VPTGQ:SNIT-AA¹⁷-QIM, VPEKM:SNIT-AA¹⁷-QIM, APTKL:SNIT-AA¹⁷-QIM, APTQL:SNIT-AA¹⁷-QIM, TPTKM:SNIT-AA¹⁷-QIM, VPARL:SNIT-AA¹⁷-QIM, APVKT:SNIT-AA¹⁷-QIM, VPQAL:SNIT-AA¹⁷-QIM, VSQDL:SNIT-AA¹⁷-QIM, VPQDL:SNIT-AA¹⁷-QIM, SRVHH:SNIT-AA¹⁷-QIM, TQVQL:SNIT-AA¹⁷-QIM, SRVQL:RSVK-AA¹⁷-AKV, VPTEL:RSVK-AA¹⁷-AKV, VPEKM:RSVK-AA¹⁷-AKV, APTKL:RSVK-AA¹⁷-AKV, APTQL:RSVK-AA¹⁷-AKV, VPTKL:RSVK-AA¹⁷-AKV, TPTKM:RSVK-AA¹⁷-AKV, VPARL:RSVK-AA¹⁷-AKV, VPTRL:RSVK-AA¹⁷-AKV, APVKT:RSVK-AA¹⁷-AKV, VPQAL:RSVK-AA¹⁷-AKV, VSQDL:RSVK-AA¹⁷-AKV, VPQDL:RSVK-AA¹⁷-AKV, VPTEE:RSVK-AA¹⁷-AKV, VPTGQ:RSVK-AA¹⁷-AKV, TQVQL:RSVK-AA¹⁷-AKV, TQVHH:RPVQ-AA¹⁷-RKI, VPTEL:RPVQ-AA¹⁷-RKI, VPEKM:RPVQ-AA¹⁷-RKI, APTKL:RPVQ-AA¹⁷-RKI, APTQL:RPVQ-AA¹⁷-RKI, VPTKL:RPVQ-AA¹⁷-RKI, TPTKM:RPVQ-AA¹⁷-RKI, VPARL:RPVQ-AA¹⁷-RKI, VPTRL:RPVQ-AA¹⁷-RKI, APVKT:RPVQ-AA¹⁷-RKI, VPQAL:RPVQ-AA¹⁷-RKI, VSQDL:RPVQ-AA¹⁷-RKI, VPQDL:RPVQ-AA¹⁷-RKI, VPTEE:RPVQ-AA¹⁷-RKI, VPTGQ:RPVQ-AA¹⁷-RKI and SRVHH:RPVQ-AA¹⁷-RKI; and wherein AA¹⁷ is selected from the group consisting of G, A, V, L, I, P, F, M, W, T and S (in particular is selected from the group consisting of M, I, L, V and T).

[0322] In particular, in certain embodiments, the pair PEP12:PEP7 is selected from the group consisting of GIPEPXX:SAIS-AA¹⁷-LYL, HVTKPTX:SAIS-AA¹⁷-LYL, YVPKPXX:SAIS-AA¹⁷-LYL, TVPKPXX:SAIS-AA¹⁷-LYL, AVPKAXX:SAIS-AA¹⁷-LYL, KVGKAXX:SAIS-AA¹⁷-LYL, KASKAXX:SAIS-AA¹⁷-LYL, GSAGPXX:SAIS-AA¹⁷-LYL, AAPASXX:SAIS-AA¹⁷-LYL, STPPTXX:SAIS-AA¹⁷-LYL, HVPKPXX:SAIS-AA¹⁷-LYL, RVPSTXX:SAIS-AA¹⁷-LYL, ASAAPXX:SAIS-AA¹⁷-LYL, ASASPXX:SAIS-AA¹⁷-LYL, SSVKXQP:SAIS-AA¹⁷-LYL, RNVQXRP:SAIS-AA¹⁷-LYL, KIPKAXX:SSLS-AA¹⁷-LFF, SIPKAXX:SSLS-AA¹⁷-LFF, HVTKPTX:SSLS-AA¹⁷-LFF, YVPKPXX:SSLS-AA¹⁷-LFF, TVPKPXX:SSLS-AA¹⁷-LFF, AVPKAXX:SSLS-AA¹⁷-LFF, KVGKAXX:SSLS-AA¹⁷-LFF, KASKAXX:SSLS-AA¹⁷-LFF, GSAGPXX:SSLS-AA¹⁷-LFF, AAPASXX:SSLS-AA¹⁷-LFF, STPPTXX:SSLS-AA¹⁷-LFF, HVPKPXX:SSLS-AA¹⁷-LFF, RVPSTXX:SSLS-AA¹⁷-LFF, ASAAPXX:SSLS-AA¹⁷-LFF, ASASPXX:SSLS-AA¹⁷-LFF, NDEGLEX:SSLS-AA¹⁷-LFF, SSVKXQP:SSLS-AA¹⁷-LFF, RNVQXRP:SSLS-AA¹⁷-LFF, KIPKAXX:NAIS-AA¹⁷-LYF, GIPEPXX:NAIS-AA¹⁷-LYF, SIPKAXX:NAIS-AA¹⁷-LYF, AVPKAXX:NAIS-AA¹⁷-LYF, KVGKAXX:NAIS-AA¹⁷-LYF, KASKAXX:NAIS-AA¹⁷-LYF, GSAGPXX:NAIS-AA¹⁷-LYF, AAPASXX:NAIS-AA¹⁷-LYF, STPPTXX:NAIS-AA¹⁷-LYF, RVPSTXX:NAIS-AA¹⁷-LYF, ASAAPXX:NAIS-AA¹⁷-LYF, ASASPXX:NAIS-AA¹⁷-LYF, NDEGLEX:NAIS-AA¹⁷-LYF, SSVKXQP:NAIS-AA¹⁷-LYF, RNVQXRP:NAIS-AA¹⁷-LYF, KIPKAXX:SATS-AA¹⁷-LYY, GIPEPXX:SATS-AA¹⁷-LYY, SIPKAXX:SATS-AA¹⁷-LYY, HVTKPTX:SATS-AA¹⁷-LYY, YVPKPXX:SATS-AA¹⁷-LYY, TVPKPXX:SATS-AA¹⁷-LYY, KVGKAXX:SATS-AA¹⁷-LYY, KASKAXX:SATS-AA¹⁷-LYY, GSAGPXX:SATS-AA¹⁷-LYY, AAPASXX:SATS-AA¹⁷-LYY, STPPTXX:SATS-AA¹⁷-LYY, HVPKPXX:SATS-AA¹⁷-LYY, RVPSTXX:SATS-AA¹⁷-LYY, ASAAPXX:SATS-AA¹⁷-LYY, ASASPXX:SATS-AA¹⁷-LYY, NDEGLEX:SATS-AA¹⁷-LYY, SSVKXQP:SATS-AA¹⁷-LYY, RNVQXRP:SATS-AA¹⁷-LYY, KIPKAXX:SPIS-AA¹⁷-LYK, GIPEPXX:SPIS-AA¹⁷-LYK, SIPKAXX:SPIS-AA¹⁷-LYK, HVTKPTX:SPIS-AA¹⁷-LYK, YVPKPXX:SPIS-AA¹⁷-LYK, TVPKPXX:SPIS-AA¹⁷-LYK, AVPKAXX:SPIS-AA¹⁷-LYK, KASKAXX:SPIS-AA¹⁷-LYK, GSAGPXX:SPIS-AA¹⁷-LYK, AAPASXX:SPIS-AA¹⁷-LYK, STPPTXX:SPIS-AA¹⁷-LYK, HVPKPXX:SPIS-AA¹⁷-LYK, RVPSTXX:SPIS-AA¹⁷-LYK, ASAAPXX:SPIS-AA¹⁷-LYK, ASASPXX:SPIS-AA¹⁷-LYK, SSVKXQP:SPIS-AA¹⁷-LYK, RNVQXRP:SPIS-AA¹⁷-LYK, KIPKAXX:EPIS-AA¹⁷-LYL, GIPEPXX:EPIS-AA¹⁷-LYL, SIPKAXX:EPIS-AA¹⁷-LYL, HVTKPTX:EPIS-AA¹⁷-LYL, YVPKPXX:EPIS-AA¹⁷-LYL, TVPKPXX:EPIS-AA¹⁷-LYL, AVPKAXX:EPIS-AA¹⁷-LYL, KVGKAXX:EPIS-AA¹⁷-LYL, GSAGPXX:EPIS-AA¹⁷-LYL, AAPASXX:EPIS-AA¹⁷-LYL, STPPTXX:EPIS-AA¹⁷-LYL, HVPKPXX:EPIS-AA¹⁷-LYL, RVPSTXX:EPIS-AA¹⁷-LYL, ASAAPXX:EPIS-AA¹⁷-LYL, ASASPXX:EPIS-AA¹⁷-LYL, SSVKXQP:EPIS-AA¹⁷-LYL, RNVQXRP:EPIS-AA¹⁷-LYL, KIPKAXX:SPIN-AA¹⁷-LYF, GIPEPXX:SPIN-AA¹⁷-LYF, SIPKAXX:SPIN-AA¹⁷-LYF, HVTKPTX:SPIN-AA¹⁷-LYF, YVPKPXX:SPIN-AA¹⁷-LYF, TVPKPXX:SPIN-AA¹⁷-LYF, AVPKAXX:SPIN-AA¹⁷-LYF, KVGKAXX:SPIN-AA¹⁷-LYF, KASKAXX:SPIN-AA¹⁷-LYF, AAPASXX:SPIN-AA¹⁷-LYF, STPPTXX:SPIN-AA¹⁷-LYF, HVPKPXX:SPIN-AA¹⁷-LYF, RVPSTXX:SPIN-AA¹⁷-LYF, ASAAPXX:SPIN-AA¹⁷-LYF, ASASPXX:SPIN-AA¹⁷-LYF, NDEGLEX:SPIN-AA¹⁷-LYF, SSVKXQP:SPIN-AA¹⁷-LYF, RNVQXRP:SPIN-AA¹⁷-LYF, KIPKAXX:SPIS-AA¹⁷-LYI, GIPEPXX:SPIS-AA¹⁷-LYI, SIPKAXX:SPIS-AA¹⁷-LYI, HVTKPTX:SPIS-AA¹⁷-LYI, YVPKPXX:SPIS-AA¹⁷-LYI, TVPKPXX:SPIS-AA¹⁷-LYI, AVPKAXX:SPIS-AA¹⁷-LYI, KVGKAXX:SPIS-AA¹⁷-LYI, KASKAXX:SPIS-AA¹⁷-LYI, GSAGPXX:SPIS-AA¹⁷-LYI, STPPTXX:SPIS-AA¹⁷-LYI, HVPKPXX:SPIS-AA¹⁷-LYI, RVPSTXX:SPIS-AA¹⁷-LYI, ASAAPXX:SPIS-AA¹⁷-LYI, ASASPXX:SPIS-AA¹⁷-LYI, NDEGLEX:SPIS-AA¹⁷-LYI, SSVKXQP:SPIS-AA¹⁷-LYI, RNVQXRP:SPIS-AA¹⁷-LYI, KIPKAXX:SPIS-AA¹⁷-LFI, GIPEPXX:SPIS-AA¹⁷-LFI, SIPKAXX:SPIS-AA¹⁷-LFI, HVTKPTX:SPIS-AA¹⁷-LFI, YVPKPXX:SPIS-AA¹⁷-LFI, TVPKPXX:SPIS-AA¹⁷-LFI, AVPKAXX:SPIS-AA¹⁷-LFI, KVGKAXX:SPIS-AA¹⁷-LFI, KASKAXX:SPIS-AA¹⁷-LFI, GSAGPXX:SPIS-AA¹⁷-LFI, AAPASXX:SPIS-AA¹⁷-LFI, HVPKPXX:SPIS-AA¹⁷-LFI, RVPSTXX:SPIS-AA¹⁷-LFI, ASAAPXX:SPIS-AA¹⁷-LFI, ASASPXX:SPIS-AA¹⁷-LFI, SSVKXQP:SPIS-AA¹⁷-LFI, RNVQXRP:SPIS-AA¹⁷-LFI, KIPKAXX:KPLS-AA¹⁷-LYV, GIPEPXX:KPLS-AA¹⁷-LYV, SIPKAXX:KPLS-AA¹⁷-LYV, HVTKPTX:KPLS-AA¹⁷-LYV, YVPKPXX:KPLS-AA¹⁷-LYV, TVPKPXX:KPLS-AA¹⁷-LYV, AVPKAXX:KPLS-AA¹⁷-LYV, KVGKAXX:KPLS-AA¹⁷-LYV, KASKAXX:KPLS-AA¹⁷-LYV, GSAGPXX:KPLS-AA¹⁷-LYV, AAPASXX:KPLS-AA¹⁷-LYV, STPPTXX:KPLS-AA¹⁷-LYV, HVPKPXX:KPLS-AA¹⁷-LYV, ASAAPXX:KPLS-AA¹⁷-LYV, ASASPXX:KPLS-AA¹⁷-LYV, NDEGLEX:KPLS-AA¹⁷-LYV, SSVKXQP:KPLS-AA¹⁷-LYV, RNVQXRP:KPLS-AA¹⁷-LYV, KIPKAXX:EPLP-AA¹⁷-VYY, GIPEPXX:EPLP-AA¹⁷-VYY, SIPKAXX:EPLP-AA¹⁷-VYY, HVTKPTX:EPLP-AA¹⁷-VYY, YVPKPXX:EPLP-AA¹⁷-VYY, TVPKPXX:EPLP-AA¹⁷-VYY, AVPKAXX:EPLP-AA¹⁷-VYY, KVGKAXX:EPLP-AA¹⁷-VYY, KASKAXX:EPLP-AA¹⁷-VYY, GSAGPXX:EPLP-AA¹⁷-VYY, AAPASXX:EPLP-AA¹⁷-VYY, STPPTXX:EPLP-AA¹⁷-VYY, HVPKPXX:EPLP-AA¹⁷-VYY, RVPSTXX:EPLP-AA¹⁷-VYY, ASASPXX:EPLP-AA¹⁷-VYY, NDEGLEX:EPLP-AA¹⁷-VYY, SSVKXQP:EPLP-AA¹⁷-VYY, RNVQXRP:EPLP-AA¹⁷-VYY, KIPKAXX:EPLT-AA¹⁷-LYY, GIPEPXX:EPLT-AA¹⁷-LYY, SIPKAXX:EPLT-AA¹⁷-LYY, HVTKPTX:EPLT-AA¹⁷-LYY, YVPKPXX:EPLT-AA¹⁷-LYY, TVPKPXX:EPLT-AA¹⁷-LYY, AVPKAXX:EPLT-AA¹⁷-LYY, KVGKAXX:EPLT-AA¹⁷-LYY, KASKAXX:EPLT-AA¹⁷-LYY, GSAGPXX:EPLT-AA¹⁷-LYY, AAPASXX:EPLT-AA¹⁷-LYY, STPPTXX:EPLT-AA¹⁷-LYY, HVPKPXX:EPLT-AA¹⁷-LYY, RVPSTXX:EPLT-AA¹⁷-LYY, ASAAPXX:EPLT-AA¹⁷-LYY, ASASPXX:EPLT-AA¹⁷-LYY, NDEGLEX:EPLT-AA¹⁷-LYY, SSVKXQP:EPLT-AA¹⁷-LYY, RNVQXRP:EPLT-AA¹⁷-LYY, NDEGLEX:SNIT-AA¹⁷-QIM, GIPEPXX:SNIT-AA¹⁷-QIM, HVTKPTX:SNIT-AA¹⁷-QIM, YVPKPXX:SNIT-AA¹⁷-QIM, TVPKPXX:SNIT-AA¹⁷-QIM, AVPKAXX:SNIT-AA¹⁷-QIM, GSAGPXX:SNIT-AA¹⁷-QIM, AAPASXX:SNIT-AA¹⁷-QIM, HVPKPXX:SNIT-AA¹⁷-QIM, RVPSTXX:SNIT-AA¹⁷-QIM, ASAAPXX:SNIT-AA¹⁷-QIM, ASASPXX:SNIT-AA¹⁷-QIM, SSVKXQP:SNIT-AA¹⁷-QIM, RNVQXRP:SNIT-AA¹⁷-QIM, RNVQXRP:RSVK-AA¹⁷-AKV, KIPKAXX:RSVK-AA¹⁷-AKV, GIPEPXX:RSVK-AA¹⁷-AKV, SIPKAXX:RSVK-AA¹⁷-AKV, HVTKPTX:RSVK-AA¹⁷-AKV, YVPKPXX:RSVK-AA¹⁷-AKV, TVPKPXX:RSVK-AA¹⁷-AKV, AVPKAXX:RSVK-AA¹⁷-AKV, KVGKAXX:RSVK-AA¹⁷-AKV, KASKAXX:RSVK-AA¹⁷-AKV, GSAGPXX:RSVK-AA¹⁷-AKV, AAPASXX:RSVK-AA¹⁷-AKV, STPPTXX:RSVK-AA¹⁷-AKV, HVPKPXX:RSVK-AA¹⁷-AKV, RVPSTXX:RSVK-AA¹⁷-AKV, ASAAPXX:RSVK-AA¹⁷-AKV, ASASPXX:RSVK-AA¹⁷-AKV, NDEGLEX:RSVK-AA¹⁷-AKV, SSVKXQP:RPVQ-AA¹⁷-RKI, KIPKAXX:RPVQ-AA¹⁷-RKI, GIPEPXX:RPVQ-AA¹⁷-RKI, SIPKAXX:RPVQ-AA¹⁷-RKI, HVTKPTX:RPVQ-AA¹⁷-RKI, YVPKPXX:RPVQ-AA¹⁷-RKI, TVPKPXX:RPVQ-AA¹⁷-RKI, AVPKAXX:RPVQ-AA¹⁷-RKI, KVGKAXX:RPVQ-AA¹⁷-RKI, KASKAXX:RPVQ-AA¹⁷-RKI, GSAGPXX:RPVQ-AA¹⁷-RKI, AAPASXX:RPVQ-AA¹⁷-RKI, STPPTXX:RPVQ-AA¹⁷-RKI, HVPKPXX:RPVQ-AA¹⁷-RKI, RVPSTXX:RPVQ-AA¹⁷-RKI, ASAAPXX:RPVQ-AA¹⁷-RKI, ASASPXX:RPVQ-AA¹⁷-RKI and NDEGLEX:RPVQ-AA¹⁷-RKI; and wherein AA¹⁷ is selected from the group consisting of G, A, V, L, I, P, F, M, W, T and S (in particular is selected from the group consisting of M, I, L, V and T).

[0323] In particular, in certain embodiments, the pair PEP12:PEP9 is selected from the group consisting of GIPEPXXVPTKM:SAIS-AA¹⁷-LYL, HVTKPTXVPTKL:SAIS-AA¹⁷-LYL, YVPKPXXVPTKL:SAIS-AA¹⁷-LYL, TVPKPXXVPTQL:SAIS-AA¹⁷-LYL, AVPKAXXVPTKL:SAIS-AA¹⁷-LYL, KVGKAXXVPTKL:SAIS-AA¹⁷-LYL, KASKAXXVPTKL:SAIS-AA¹⁷-LYL, GSAGPXXVPTKM:SAIS-AA¹⁷-LYL, AAPASXXVPTRL:SAIS-AA¹⁷-LYL, STPPTXXVPTRL:SAIS-AA¹⁷-LYL, HVPKPXXVPTKL:SAIS-AA¹⁷-LYL, RVPSTXXVPTKT:SAIS-AA¹⁷-LYL, ASAAPXXVPTAL:SAIS-AA¹⁷-LYL, ASASPXXVPTDL:SAIS-AA¹⁷-LYL, GIPEPXXVPEKM:SAIS-AA¹⁷-LYL, HVTKPTXAPTKL:SAIS-AA¹⁷-LYL, YVPKPXXAPTKL:SAIS-AA¹⁷-LYL, TVPKPXXAPTQL:SAIS-AA¹⁷-LYL, AVPKAXXAPTKL:SAIS-AA¹⁷-LYL, GSAGPXXTPTKM:SAIS-AA¹⁷-LYL, AAPASXXVPARL:SAIS-AA¹⁷-LYL, HVPKPXXAPTKL:SAIS-AA¹⁷-LYL, RVPSTXXAPVKT:SAIS-AA¹⁷-LYL, ASAAPXXVPQAL:SAIS-AA¹⁷-LYL, ASASPXXVSQDL:SAIS-AA¹⁷-LYL, ASASPXXVPQDL:SAIS-AA¹⁷-LYL, SSVKXQPSRVHH:SAIS-AA¹⁷-LYL, RNVQXRPTQVQL:SAIS-AA¹⁷-LYL, KIPKAXXVPEEL:SSLS-AA¹⁷-LFF, SIPKAXXVPEEL:SSLS-AA¹⁷-LFF, HVTKPTXVPEKL:SSLS-AA¹⁷-LFF, YVPKPXXVPEKL:SSLS-AA¹⁷-LFF, TVPKPXXVPEQL:SSLS-AA¹⁷-LFF, AVPKAXXVPEKL:SSLS-AA¹⁷-LFF, KVGKAXXVPEKL:SSLS-AA¹⁷-LFF, KASKAXXVPEKL:SSLS-AA¹⁷-LFF, GSAGPXXVPEKM:SSLS-AA¹⁷-LFF, AAPASXXVPERL:SSLS-AA¹⁷-LFF, STPPTXXVPERL:SSLS-AA¹⁷-LFF, HVPKPXXVPEKL:SSLS-AA¹⁷-LFF, RVPSTXXVPEKT:SSLS-AA¹⁷-LFF, ASAAPXXVPEAL:SSLS-AA¹⁷-LFF, ASASPXXVPEDL:SSLS-AA¹⁷-LFF, KIPKAXXVPTEL:SSLS-AA¹⁷-LFF, SIPKAXXVPTEL:SSLS-AA¹⁷-LFF, HVTKPTXAPTKL:SSLS-AA¹⁷-LFF, YVPKPXXAPTKL:SSLS-AA¹⁷-LFF, TVPKPXXAPTQL:SSLS-AA¹⁷-LFF, AVPKAXXAPTKL:SSLS-AA¹⁷-LFF, KVGKAXXVPTKL:SSLS-AA¹⁷-LFF, KASKAXXVPTKL:SSLS-AA¹⁷-LFF, GSAGPXXTPTKM:SSLS-AA¹⁷-LFF, AAPASXXVPARL:SSLS-AA¹⁷-LFF, STPPTXXVPTRL:SSLS-AA¹⁷-LFF, HVPKPXXAPTKL:SSLS-AA¹⁷-LFF, RVPSTXXAPVKT:SSLS-AA¹⁷-LFF, ASAAPXXVPQAL:SSLS-AA¹⁷-LFF, ASASPXXVSQDL:SSLS-AA¹⁷-LFF, ASASPXXVPQDL:SSLS-AA¹⁷-LFF, NDEGLEXVPTEE:SSLS-AA¹⁷-LFF, NDEGLEXVPTGQ:SSLS-AA¹⁷-LFF, SSVKXQPSRVHH:SSLS-AA¹⁷-LFF, RNVQXRPTQVQL:SSLS-AA¹⁷-LFF, KIPKAXXAPTEL:NAIS-AA¹⁷-LYF, GIPEPXXAPTKM:NAIS-AA¹⁷-LYF, SIPKAXXAPTEL:NAIS-AA¹⁷-LYF, AVPKAXXAPTKL:NAIS-AA¹⁷-LYF, KVGKAXXAPTKL:NAIS-AA¹⁷-LYF, KASKAXXAPTKL:NAIS-AA¹⁷-LYF, GSAGPXXAPTKM:NAIS-AA¹⁷-LYF, AAPASXXAPTRL:NAIS-AA¹⁷-LYF, STPPTXXAPTRL:NAIS-AA¹⁷-LYF, RVPSTXXAPTKT:NAIS-AA¹⁷-LYF, ASAAPXXAPTAL:NAIS-AA¹⁷-LYF, ASASPXXAPTDL:NAIS-AA¹⁷-LYF, KIPKAXXVPTEL:NAIS-AA¹⁷-LYF, GIPEPXXVPEKM:NAIS-AA¹⁷-LYF, SIPKAXXVPTEL:NAIS-AA¹⁷-LYF, KVGKAXXVPTKL:NAIS-AA¹⁷-LYF, KASKAXXVPTKL:NAIS-AA¹⁷-LYF, GSAGPXXTPTKM:NAIS-AA¹⁷-LYF, AAPASXXVPARL:NAIS-AA¹⁷-LYF, STPPTXXVPTRL:NAIS-AA¹⁷-LYF, RVPSTXXAPVKT:NAIS-AA¹⁷-LYF, ASAAPXXVPQAL:NAIS-AA¹⁷-LYF, ASASPXXVSQDL:NAIS-AA¹⁷-LYF, ASASPXXVPQDL:NAIS-AA¹⁷-LYF, NDEGLEXVPTEE:NAIS-AA¹⁷-LYF, NDEGLEXVPTGQ:NAIS-AA¹⁷-LYF, SSVKXQPSRVHH:NAIS-AA¹⁷-LYF, RNVQXRPTQVQL:NAIS-AA¹⁷-LYF, KIPKAXXAPTEL:SATS-AA¹⁷-LYY, GIPEPXXAPTKM:SATS-AA¹⁷-LYY, SIPKAXXAPTEL:SATS-AA¹⁷-LYY, HVTKPTXAPTKL:SATS-AA¹⁷-LYY, YVPKPXXAPTKL:SATS-AA¹⁷-LYY, TVPKPXXAPTQL:SATS-AA¹⁷-LYY, KVGKAXXAPTKL:SATS-AA¹⁷-LYY, KASKAXXAPTKL:SATS-AA¹⁷-LYY, GSAGPXXAPTKM:SATS-AA¹⁷-LYY, AAPASXXAPTRL:SATS-AA¹⁷-LYY, STPPTXXAPTRL:SATS-AA¹⁷-LYY, HVPKPXXAPTKL:SATS-AA¹⁷-LYY, RVPSTXXAPTKT:SATS-AA¹⁷-LYY, ASAAPXXAPTAL:SATS-AA¹⁷-LYY, ASASPXXAPTDL:SATS-AA¹⁷-LYY, KIPKAXXVPTEL:SATS-AA¹⁷-LYY, GIPEPXXVPEKM:SATS-AA¹⁷-LYY, SIPKAXXVPTEL:SATS-AA¹⁷-LYY, KVGKAXXVPTKL:SATS-AA¹⁷-LYY, KASKAXXVPTKL:SATS-AA¹⁷-LYY, GSAGPXXTPTKM:SATS-AA¹⁷-LYY, AAPASXXVPARL:SATS-AA¹⁷-LYY, STPPTXXVPTRL:SATS-AA¹⁷-LYY, RVPSTXXAPVKT:SATS-AA¹⁷-LYY, ASAAPXXVPQAL:SATS-AA¹⁷-LYY, ASASPXXVSQDL:SATS-AA¹⁷-LYY, ASASPXXVPQDL:SATS-AA¹⁷-LYY, NDEGLEXVPTEE:SATS-AA¹⁷-LYY, NDEGLEXVPTGQ:SATS-AA¹⁷-LYY, SSVKXQPSRVHH:SATS-AA¹⁷-LYY, RNVQXRPTQVQL:SATS-AA¹⁷-LYY, KIPKAXXVPTEL:SPIS-AA¹⁷-LYK, GIPEPXXVPTKM:SPIS-AA¹⁷-LYK, SIPKAXXVPTEL:SPIS-AA¹⁷-LYK, HVTKPTXVPTKL:SPIS-AA¹⁷-LYK, YVPKPXXVPTKL:SPIS-AA¹⁷-LYK, TVPKPXXVPTQL:SPIS-AA¹⁷-LYK, AVPKAXXVPTKL:SPIS-AA¹⁷-LYK, KASKAXXVPTKL:SPIS-AA¹⁷-LYK, GSAGPXXVPTKM:SPIS-AA¹⁷-LYK, AAPASXXVPTRL:SPIS-AA¹⁷-LYK, STPPTXXVPTRL:SPIS-AA¹⁷-LYK, HVPKPXXVPTKL:SPIS-AA¹⁷-LYK, RVPSTXXVPTKT:SPIS-AA¹⁷-LYK, ASAAPXXVPTAL:SPIS-AA¹⁷-LYK, ASASPXXVPTDL:SPIS-AA¹⁷-LYK, GIPEPXXVPEKM:SPIS-AA¹⁷-LYK, HVTKPTXAPTKL:SPIS-AA¹⁷-LYK, YVPKPXXAPTKL:SPIS-AA¹⁷-LYK, TVPKPXXAPTQL:SPIS-AA¹⁷-LYK, AVPKAXXAPTKL:SPIS-AA¹⁷-LYK, GSAGPXXTPTKM:SPIS-AA¹⁷-LYK, AAPASXXVPARL:SPIS-AA¹⁷-LYK, HVPKPXXAPTKL:SPIS-AA¹⁷-LYK, RVPSTXXAPVKT:SPIS-AA¹⁷-LYK, ASAAPXXVPQAL:SPIS-AA¹⁷-LYK, ASASPXXVSQDL:SPIS-AA¹⁷-LYK, ASASPXXVPQDL:SPIS-AA¹⁷-LYK, SSVKXQPSRVHH:SPIS-AA¹⁷-LYK, RNVQXRPTQVQL:SPIS-AA¹⁷-LYK, KIPKAXXVPTEL:EPIS-AA¹⁷-LYL, GIPEPXXVPTKM:EPIS-AA¹⁷-LYL, SIPKAXXVPTEL:EPIS-AA¹⁷-LYL, HVTKPTXVPTKL:EPIS-AA¹⁷-LYL, YVPKPXXVPTKL:EPIS-AA¹⁷-LYL, TVPKPXXVPTQL:EPIS-AA¹⁷-LYL, AVPKAXXVPTKL:EPIS-AA¹⁷-LYL, KVGKAXXVPTKL:EPIS-AA¹⁷-LYL, GSAGPXXVPTKM:EPIS-AA¹⁷-LYL, AAPASXXVPTRL:EPIS-AA¹⁷-LYL, STPPTXXVPTRL:EPIS-AA¹⁷-LYL, HVPKPXXVPTKL:EPIS-AA¹⁷-LYL, RVPSTXXVPTKT:EPIS-AA¹⁷-LYL, ASAAPXXVPTAL:EPIS-AA¹⁷-LYL, ASASPXXVPTDL:EPIS-AA¹⁷-LYL, GIPEPXXVPEKM:EPIS-AA¹⁷-LYL, HVTKPTXAPTKL:EPIS-AA¹⁷-LYL, YVPKPXXAPTKL:EPIS-AA¹⁷-LYL, TVPKPXXAPTQL:EPIS-AA¹⁷-LYL, AVPKAXXAPTKL:EPIS-AA¹⁷-LYL, GSAGPXXTPTKM:EPIS-AA¹⁷-LYL, AAPASXXVPARL:EPIS-AA¹⁷-LYL, HVPKPXXAPTKL:EPIS-AA¹⁷-LYL, RVPSTXXAPVKT:EPIS-AA¹⁷-LYL, ASAAPXXVPQAL:EPIS-AA¹⁷-LYL, ASASPXXVSQDL:EPIS-AA¹⁷-LYL, ASASPXXVPQDL:EPIS-AA¹⁷-LYL, SSVKXQPSRVHH:EPIS-AA¹⁷-LYL, RNVQXRPTQVQL:EPIS-AA¹⁷-LYL, KIPKAXXTPTEL:SPIN-AA¹⁷-LYF, GIPEPXXTPTKM:SPIN-AA¹⁷-LYF, SIPKAXXTPTEL:SPIN-AA¹⁷-LYF, HVTKPTXTPTKL:SPIN-AA¹⁷-LYF, YVPKPXXTPTKL:SPIN-AA¹⁷-LYF, TVPKPXXTPTQL:SPIN-AA¹⁷-LYF, AVPKAXXTPTKL:SPIN-AA¹⁷-LYF, KVGKAXXTPTKL:SPIN-AA¹⁷-LYF, KASKAXXTPTKL:SPIN-AA¹⁷-LYF, AAPASXXTPTRL:SPIN-AA¹⁷-LYF, STPPTXXTPTRL:SPIN-AA¹⁷-LYF, HVPKPXXTPTKL:SPIN-AA¹⁷-LYF, RVPSTXXTPTKT:SPIN-AA¹⁷-LYF, ASAAPXXTPTAL:SPIN-AA¹⁷-LYF, ASASPXXTPTDL:SPIN-AA¹⁷-LYF, KIPKAXXVPTEL:SPIN-AA¹⁷-LYF, GIPEPXXVPEKM:SPIN-AA¹⁷-LYF, SIPKAXXVPTEL:SPIN-AA¹⁷-LYF, HVTKPTXAPTKL:SPIN-AA¹⁷-LYF, YVPKPXXAPTKL:SPIN-AA¹⁷-LYF, TVPKPXXAPTQL:SPIN-AA¹⁷-LYF, AVPKAXXAPTKL:SPIN-AA¹⁷-LYF, KVGKAXXVPTKL:SPIN-AA¹⁷-LYF, KASKAXXVPTKL:SPIN-AA¹⁷-LYF, AAPASXXVPARL:SPIN-AA¹⁷-LYF, STPPTXXVPTRL:SPIN-AA¹⁷-LYF, HVPKPXXAPTKL:SPIN-AA¹⁷-LYF, RVPSTXXAPVKT:SPIN-AA¹⁷-LYF, ASAAPXXVPQAL:SPIN-AA¹⁷-LYF, ASASPXXVSQDL:SPIN-AA¹⁷-LYF, ASASPXXVPQDL:SPIN-AA¹⁷-LYF, NDEGLEXVPTEE:SPIN-AA¹⁷-LYF, NDEGLEXVPTGQ:SPIN-AA¹⁷-LYF, SSVKXQPSRVHH:SPIN-AA¹⁷-LYF, RNVQXRPTQVQL:SPIN-AA¹⁷-LYF, KIPKAXXVPAEL:SPIS-AA¹⁷-LYI, GIPEPXXVPAKM:SPIS-AA¹⁷-LYI, SIPKAXXVPAEL:SPIS-AA¹⁷-LYI, HVTKPTXVPAKL:SPIS-AA¹⁷-LYI, YVPKPXXVPAKL:SPIS-AA¹⁷-LYI, TVPKPXXVPAQL:SPIS-AA¹⁷-LYI, AVPKAXXVPAKL:SPIS-AA¹⁷-LYI, KVGKAXXVPAKL:SPIS-AA¹⁷-LYI, KASKAXXVPAKL:SPIS-AA¹⁷-LYI, GSAGPXXVPAKM:SPIS-AA¹⁷-LYI, STPPTXXVPARL:SPIS-AA¹⁷-LYI, HVPKPXXVPAKL:SPIS-AA¹⁷-LYI, RVPSTXXVPAKT:SPIS-AA¹⁷-LYI, ASAAPXXVPAAL:SPIS-AA¹⁷-LYI, ASASPXXVPADL:SPIS-AA¹⁷-LYI, KIPKAXXVPTEL:SPIS-AA¹⁷-LYI, GIPEPXXVPEKM:SPIS-AA¹⁷-LYI, SIPKAXXVPTEL:SPIS-AA¹⁷-LYI, HVTKPTXAPTKL:SPIS-AA¹⁷-LYI, YVPKPXXAPTKL:SPIS-AA¹⁷-LYI, TVPKPXXAPTQL:SPIS-AA¹⁷-LYI, AVPKAXXAPTKL:SPIS-AA¹⁷-LYI, KVGKAXXVPTKL:SPIS-AA¹⁷-LYI, KASKAXXVPTKL:SPIS-AA¹⁷-LYI, GSAGPXXTPTKM:SPIS-AA¹⁷-LYI, STPPTXXVPTRL:SPIS-AA¹⁷-LYI, HVPKPXXAPTKL:SPIS-AA¹⁷-LYI, RVPSTXXAPVKT:SPIS-AA¹⁷-LYI, ASAAPXXVPQAL:SPIS-AA¹⁷-LYI, ASASPXXVSQDL:SPIS-AA¹⁷-LYI, ASASPXXVPQDL:SPIS-AA¹⁷-LYI, NDEGLEXVPTEE:SPIS-AA¹⁷-LYI, NDEGLEXVPTGQ:SPIS-AA¹⁷-LYI, SSVKXQPSRVHH:SPIS-AA¹⁷-LYI, RNVQXRPTQVQL:SPIS-AA¹⁷-LYI, KIPKAXXVPTEL:SPIS-AA¹⁷-LFI, GIPEPXXVPTKM:SPIS-AA¹⁷-LFI, SIPKAXXVPTEL:SPIS-AA¹⁷-LFI, HVTKPTXVPTKL:SPIS-AA¹⁷-LFI, YVPKPXXVPTKL:SPIS-AA¹⁷-LFI, TVPKPXXVPTQL:SPIS-AA¹⁷-LFI, AVPKAXXVPTKL:SPIS-AA¹⁷-LFI, KVGKAXXVPTKL:SPIS-AA¹⁷-LFI, KASKAXXVPTKL:SPIS-AA¹⁷-LFI, GSAGPXXVPTKM:SPIS-AA¹⁷-LFI, AAPASXXVPTRL:SPIS-AA¹⁷-LFI, HVPKPXXVPTKL:SPIS-AA¹⁷-LFI, RVPSTXXVPTKT:SPIS-AA¹⁷-LFI, ASAAPXXVPTAL:SPIS-AA¹⁷-LFI, ASASPXXVPTDL:SPIS-AA¹⁷-LFI, GIPEPXXVPEKM:SPIS-AA¹⁷-LFI, HVTKPTXAPTKL:SPIS-AA¹⁷-LFI, YVPKPXXAPTKL:SPIS-AA¹⁷-LFI, TVPKPXXAPTQL:SPIS-AA¹⁷-LFI, AVPKAXXAPTKL:SPIS-AA¹⁷-LFI, GSAGPXXTPTKM:SPIS-AA¹⁷-LFI, AAPASXXVPARL:SPIS-AA¹⁷-LFI, HVPKPXXAPTKL:SPIS-AA¹⁷-LFI, RVPSTXXAPVKT:SPIS-AA¹⁷-LFI, ASAAPXXVPQAL:SPIS-AA¹⁷-LFI, ASASPXXVSQDL:SPIS-AA¹⁷-LFI, ASASPXXVPQDL:SPIS-AA¹⁷-LFI, SSVKXQPSRVHH:SPIS-AA¹⁷-LFI, RNVQXRPTQVQL:SPIS-AA¹⁷-LFI, KIPKAXXAPVEL:KPLS-AA¹⁷-LYV, GIPEPXXAPVKM:KPLS-AA¹⁷-LYV, SIPKAXXAPVEL:KPLS-AA¹⁷-LYV, HVTKPTXAPVKL:KPLS-AA¹⁷-LYV, YVPKPXXAPVKL:KPLS-AA¹⁷-LYV, TVPKPXXAPVQL:KPLS-AA¹⁷-LYV, AVPKAXXAPVKL:KPLS-AA¹⁷-LYV, KVGKAXXAPVKL:KPLS-AA¹⁷-LYV, KASKAXXAPVKL:KPLS-AA¹⁷-LYV, GSAGPXXAPVKM:KPLS-AA¹⁷-LYV, AAPASXXAPVRL:KPLS-AA¹⁷-LYV, STPPTXXAPVRL:KPLS-AA¹⁷-LYV, HVPKPXXAPVKL:KPLS-AA¹⁷-LYV, ASAAPXXAPVAL:KPLS-AA¹⁷-LYV, ASASPXXAPVDL:KPLS-AA¹⁷-LYV, KIPKAXXVPTEL:KPLS-AA¹⁷-LYV, GIPEPXXVPEKM:KPLS-AA¹⁷-LYV, SIPKAXXVPTEL:KPLS-AA¹⁷-LYV, HVTKPTXAPTKL:KPLS-AA¹⁷-LYV, YVPKPXXAPTKL:KPLS-AA¹⁷-LYV, TVPKPXXAPTQL:KPLS-AA¹⁷-LYV, AVPKAXXAPTKL:KPLS-AA¹⁷-LYV, KVGKAXXVPTKL:KPLS-AA¹⁷-LYV, KASKAXXVPTKL:KPLS-AA¹⁷-LYV, GSAGPXXTPTKM:KPLS-AA¹⁷-LYV, AAPASXXVPARL:KPLS-AA¹⁷-LYV, STPPTXXVPTRL:KPLS-AA¹⁷-LYV, HVPKPXXAPTKL:KPLS-AA¹⁷-LYV, ASAAPXXVPQAL:KPLS-AA¹⁷-LYV, ASASPXXVSQDL:KPLS-AA¹⁷-LYV, ASASPXXVPQDL:KPLS-AA¹⁷-LYV, NDEGLEXVPTEE:KPLS-AA¹⁷-LYV, NDEGLEXVPTGQ:KPLS-AA¹⁷-LYV, SSVKXQPSRVHH:KPLS-AA¹⁷-LYV, RNVQXRPTQVQL:KPLS-AA¹⁷-LYV, KIPKAXXVPQEL:EPLP-AA¹⁷-VYY, GIPEPXXVPQKM:EPLP-AA¹⁷-VYY, SIPKAXXVPQEL:EPLP-AA¹⁷-VYY, HVTKPTXVPQKL:EPLP-AA¹⁷-VYY, YVPKPXXVPQKL:EPLP-AA¹⁷-VYY, TVPKPXXVPQQL:EPLP-AA¹⁷-VYY, AVPKAXXVPQKL:EPLP-AA¹⁷-VYY, KVGKAXXVPQKL:EPLP-AA¹⁷-VYY, KASKAXXVPQKL:EPLP-AA¹⁷-VYY, GSAGPXXVPQKM:EPLP-AA¹⁷-VYY, AAPASXXVPQRL:EPLP-AA¹⁷-VYY, STPPTXXVPQRL:EPLP-AA¹⁷-VYY, HVPKPXXVPQKL:EPLP-AA¹⁷-VYY, RVPSTXXVPQKT:EPLP-AA¹⁷-VYY, ASASPXXVPQDL:EPLP-AA¹⁷-VYY, KIPKAXXVPTEL:EPLP-AA¹⁷-VYY, GIPEPXXVPEKM:EPLP-AA¹⁷-VYY, SIPKAXXVPTEL:EPLP-AA¹⁷-VYY, HVTKPTXAPTKL:EPLP-AA¹⁷-VYY, YVPKPXXAPTKL:EPLP-AA¹⁷-VYY, TVPKPXXAPTQL:EPLP-AA¹⁷-VYY, AVPKAXXAPTKL:EPLP-AA¹⁷-VYY, KVGKAXXVPTKL:EPLP-AA¹⁷-VYY, KASKAXXVPTKL:EPLP-AA¹⁷-VYY, GSAGPXXTPTKM:EPLP-AA¹⁷-VYY, AAPASXXVPARL:EPLP-AA¹⁷-VYY, STPPTXXVPTRL:EPLP-AA¹⁷-VYY, HVPKPXXAPTKL:EPLP-AA¹⁷-VYY, RVPSTXXAPVKT:EPLP-AA¹⁷-VYY, ASASPXXVSQDL:EPLP-AA¹⁷-VYY, NDEGLEXVPTEE:EPLP-AA¹⁷-VYY, NDEGLEXVPTGQ:EPLP-AA¹⁷-VYY, SSVKXQPSRVHH:EPLP-AA¹⁷-VYY, RNVQXRPTQVQL:EPLP-AA¹⁷-VYY, KIPKAXXVSQEL:EPLT-AA¹⁷-LYY, GIPEPXXVSQKM:EPLT-AA¹⁷-LYY, SIPKAXXVSQEL:EPLT-AA¹⁷-LYY, HVTKPTXVSQKL:EPLT-AA¹⁷-LYY, YVPKPXXVSQKL:EPLT-AA¹⁷-LYY, TVPKPXXVSQQL:EPLT-AA¹⁷-LYY, AVPKAXXVSQKL:EPLT-AA¹⁷-LYY, KVGKAXXVSQKL:EPLT-AA¹⁷-LYY, KASKAXXVSQKL:EPLT-AA¹⁷-LYY, GSAGPXXVSQKM:EPLT-AA¹⁷-LYY, AAPASXXVSQRL:EPLT-AA¹⁷-LYY, STPPTXXVSQRL:EPLT-AA¹⁷-LYY, HVPKPXXVSQKL:EPLT-AA¹⁷-LYY, RVPSTXXVSQKT:EPLT-AA¹⁷-LYY, ASAAPXXVSQAL:EPLT-AA¹⁷-LYY, ASASPXXVSQDL:EPLT-AA¹⁷-LYY, KIPKAXXVPTEL:EPLT-AA¹⁷-LYY, GIPEPXXVPEKM:EPLT-AA¹⁷-LYY, SIPKAXXVPTEL:EPLT-AA¹⁷-LYY, HVTKPTXAPTKL:EPLT-AA¹⁷-LYY, YVPKPXXAPTKL:EPLT-AA¹⁷-LYY, TVPKPXXAPTQL:EPLT-AA¹⁷-LYY, AVPKAXXAPTKL:EPLT-AA¹⁷-LYY, KVGKAXXVPTKL:EPLT-AA¹⁷-LYY, KASKAXXVPTKL:EPLT-AA¹⁷-LYY, GSAGPXXTPTKM:EPLT-AA¹⁷-LYY, AAPASXXVPARL:EPLT-AA¹⁷-LYY, STPPTXXVPTRL:EPLT-AA¹⁷-LYY, HVPKPXXAPTKL:EPLT-AA¹⁷-LYY, RVPSTXXAPVKT:EPLT-AA¹⁷-LYY, ASAAPXXVPQAL:EPLT-AA¹⁷-LYY, NDEGLEXVPTEE:EPLT-AA¹⁷-LYY, NDEGLEXVPTGQ:EPLT-AA¹⁷-LYY, SSVKXQPSRVHH:EPLT-AA¹⁷-LYY, RNVQXRPTQVQL:EPLT-AA¹⁷-LYY, KIPKAXXVPQEL:EPLT-AA¹⁷-LYY, GIPEPXXVPQKM:EPLT-AA¹⁷-LYY, SIPKAXXVPQEL:EPLT-AA¹⁷-LYY, HVTKPTXVPQKL:EPLT-AA¹⁷-LYY, YVPKPXXVPQKL:EPLT-AA¹⁷-LYY, TVPKPXXVPQQL:EPLT-AA¹⁷-LYY, AVPKAXXVPQKL:EPLT-AA¹⁷-LYY, KVGKAXXVPQKL:EPLT-AA¹⁷-LYY, KASKAXXVPQKL:EPLT-AA¹⁷-LYY, GSAGPXXVPQKM:EPLT-AA¹⁷-LYY, AAPASXXVPQRL:EPLT-AA¹⁷-LYY, STPPTXXVPQRL:EPLT-AA¹⁷-LYY, HVPKPXXVPQKL:EPLT-AA¹⁷-LYY, RVPSTXXVPQKT:EPLT-AA¹⁷-LYY, ASASPXXVPQDL:EPLT-AA¹⁷-LYY, NDEGLEXVPTGQ:SNIT-AA¹⁷-QIM, GIPEPXXVPEKM:SNIT-AA¹⁷-QIM, HVTKPTXAPTKL:SNIT-AA¹⁷-QIM, YVPKPXXAPTKL:SNIT-AA¹⁷-QIM, TVPKPXXAPTQL:SNIT-AA¹⁷-QIM, AVPKAXXAPTKL:SNIT-AA¹⁷-QIM, GSAGPXXTPTKM:SNIT-AA¹⁷-QIM, AAPASXXVPARL:SNIT-AA¹⁷-QIM, HVPKPXXAPTKL:SNIT-AA¹⁷-QIM, RVPSTXXAPVKT:SNIT-AA¹⁷-QIM, ASAAPXXVPQAL:SNIT-AA¹⁷-QIM, ASASPXXVSQDL:SNIT-AA¹⁷-QIM, ASASPXXVPQDL:SNIT-AA¹⁷-QIM, SSVKXQPSRVHH:SNIT-AA¹⁷-QIM, RNVQXRPTQVQL:SNIT-AA¹⁷-QIM, RNVQXRPSRVQL:RSVK-AA¹⁷-AKV, KIPKAXXVPTEL:RSVK-AA¹⁷-AKV, GIPEPXXVPEKM:RSVK-AA¹⁷-AKV, SIPKAXXVPTEL:RSVK-AA¹⁷-AKV, HVTKPTXAPTKL:RSVK-AA¹⁷-AKV, YVPKPXXAPTKL:RSVK-AA¹⁷-AKV, TVPKPXXAPTQL:RSVK-AA¹⁷-AKV, AVPKAXXAPTKL:RSVK-AA¹⁷-AKV, KVGKAXXVPTKL:RSVK-AA¹⁷-AKV, KASKAXXVPTKL:RSVK-AA¹⁷-AKV, GSAGPXXTPTKM:RSVK-AA¹⁷-AKV, AAPASXXVPARL:RSVK-AA¹⁷-AKV, STPPTXXVPTRL:RSVK-AA¹⁷-AKV, HVPKPXXAPTKL:RSVK-AA¹⁷-AKV, RVPSTXXAPVKT:RSVK-AA¹⁷-AKV, ASAAPXXVPQAL:RSVK-AA¹⁷-AKV, ASASPXXVSQDL:RSVK-AA¹⁷-AKV, ASASPXXVPQDL:RSVK-AA¹⁷-AKV, NDEGLEXVPTEE:RSVK-AA¹⁷-AKV, NDEGLEXVPTGQ:RSVK-AA¹⁷-AKV, RNVQXRPTQVQL:RSVK-AA¹⁷-AKV, SSVKXQPTQVHH:RPVQ-AA¹⁷-RKI, KIPKAXXVPTEL:RPVQ-AA¹⁷-RKI, GIPEPXXVPEKM:RPVQ-AA¹⁷-RKI, SIPKAXXVPTEL:RPVQ-AA¹⁷-RKI, HVTKPTXAPTKL:RPVQ-AA¹⁷-RKI, YVPKPXXAPTKL:RPVQ-AA¹⁷-RKI, TVPKPXXAPTQL:RPVQ-AA¹⁷-RKI, AVPKAXXAPTKL:RPVQ-AA¹⁷-RKI, KVGKAXXVPTKL:RPVQ-AA¹⁷-RKI, KASKAXXVPTKL:RPVQ-AA¹⁷-RKI, GSAGPXXTPTKM:RPVQ-AA¹⁷-RKI, AAPASXXVPARL:RPVQ-AA¹⁷-RKI, STPPTXXVPTRL:RPVQ-AA¹⁷-RKI, HVPKPXXAPTKL:RPVQ-AA¹⁷-RKI, RVPSTXXAPVKT:RPVQ-AA¹⁷-RKI, ASAAPXXVPQAL:RPVQ-AA¹⁷-RKI, ASASPXXVSQDL:RPVQ-AA¹⁷-RKI, ASASPXXVPQDL:RPVQ-AA¹⁷-RKI, NDEGLEXVPTEE:RPVQ-AA¹⁷-RKI, NDEGLEXVPTGQ:RPVQ-AA¹⁷-RKI and SSVKXQPSRVHH:RPVQ-AA¹⁷-RKI; and wherein AA¹⁷ is selected from the group consisting of G, A, V, L, I, P, F, M, W, T and S (in particular is selected from the group consisting of M, I, L, V and T).

[0324] In certain embodiments, the triplet PEP7:PEP3:PEP1 is selected from the group consisting of

GIPEPXX:VPT:SAIS, HVTKPTX:VPT:SAIS,
YVPKPXX:VPT:SAIS, TVPKPXX:VPT:SAIS,
AVPKAXX:VPT:SAIS, KVGKAXX:VPT:SAIS,
KASKAXX:VPT:SAIS, GSAGPXX:VPT:SAIS,
AAPASXX:VPT:SAIS, STPPTXX:VPT:SAIS,
HVPKPXX:VPT:SAIS, RVPSTXX:VPT:SAIS,
ASAAPXX:VPT:SAIS, ASASPXX:VPT:SAIS,
GIPEPXX:VPE:SAIS, HVTKPTX:APT:SAIS,
YVPKPXX:APT:SAIS, TVPKPXX:APT:SAIS,
AVPKAXX:APT:SAIS, GSAGPXX:TPT:SAIS,
AAPASXX:VPA:SAIS, HVPKPXX:APT:SAIS,
RVPSTXX:APV:SAIS, ASAAPXX:VPQ:SAIS,
ASASPXX:VSQ:SAIS, ASASPXX:VPQ:SAIS,
SSVKXQP:SRV:SAIS, RNVQXRP:TQV:SAIS,
KIPKAXX:VPE:SSLS, SIPKAXX:VPE:SSLS,
HVTKPTX:VPE:SSLS, YVPKPXX:VPE:SSLS,
TVPKPXX:VPE:SSLS, AVPKAXX:VPE:SSLS,
KVGKAXX:VPE:SSLS, KASKAXX:VPE:SSLS,
GSAGPXX:VPE:SSLS, AAPASXX:VPE:SSLS,
STPPTXX:VPE:SSLS, HVPKPXX:VPE:SSLS,
RVPSTXX:VPE:SSLS, ASAAPXX:VPE:SSLS,
ASASPXX:VPE:SSLS, KIPKAXX:VPT:SSLS,
SIPKAXX:VPT:SSLS, HVTKPTX:APT:SSLS,
YVPKPXX:APT:SSLS, TVPKPXX:APT:SSLS,
AVPKAXX:APT:SSLS, KVGKAXX:VPT:SSLS,
KASKAXX:VPT:SSLS, GSAGPXX:TPT:SSLS,
AAPASXX:VPA:SSLS, STPPTXX:VPT:SSLS,
HVPKPXX:APT:SSLS, RVPSTXX:APV:SSLS,
ASAAPXX:VPQ:SSLS, ASASPXX:VSQ:SSLS,
ASASPXX:VPQ:SSLS, NDEGLEX:VPT:SSLS,
SSVKXQP:SRV:SSLS, RNVQXRP:TQV:SSLS,
KIPKAXX:APT:NAIS, GIPEPXX:APT:NAIS,
SIPKAXX:APT:NAIS, AVPKAXX:APT:NAIS,
KVGKAXX:APT:NAIS, KASKAXX:APT:NAIS,
GSAGPXX:APT:NAIS, AAPASXX:APT:NAIS,
STPPTXX:APT:NAIS, RVPSTXX:APT:NAIS,
ASAAPXX:APT:NAIS, ASASPXX:APT:NAIS,
KIPKAXX:VPT:NAIS, GIPEPXX:VPE:NAIS,
SIPKAXX:VPT:NAIS, KVGKAXX:VPT:NAIS,
KASKAXX:VPT:NAIS, GSAGPXX:TPT:NAIS,
AAPASXX:VPA:NAIS, STPPTXX:VPT:NAIS,
RVPSTXX:APV:NAIS, ASAAPXX:VPQ:NAIS,
ASASPXX:VSQ:NAIS, ASASPXX:VPQ:NAIS,
NDEGLEX:VPT:NAIS, SSVKXQP:SRV:NAIS,
RNVQXRP:TQV:NAIS, KIPKAXX:APT:SATS,
GIPEPXX:APT:SATS, SIPKAXX:APT:SATS,
HVTKPTX:APT:SATS, YVPKPXX:APT:SATS,
TVPKPXX:APT:SATS, KVGKAXX:APT:SATS,
KASKAXX:APT:SATS, GSAGPXX:APT:SATS,
AAPASXX:APT:SATS, STPPTXX:APT:SATS,
HVPKPXX:APT:SATS, RVPSTXX:APT:SATS,
ASAAPXX:APT:SATS, ASASPXX:APT:SATS,
KIPKAXX:VPT:SATS, GIPEPXX:VPE:SATS,
SIPKAXX:VPT:SATS, KVGKAXX:VPT:SATS,
KASKAXX:VPT:SATS, GSAGPXX:TPT:SATS,
AAPASXX:VPA:SATS, STPPTXX:VPT:SATS,
RVPSTXX:APV:SATS, ASAAPXX:VPQ:SATS,
ASASPXX:VSQ:SATS, ASASPXX:VPQ:SATS,
NDEGLEX:VPT:SATS, SSVKXQP:SRV:SATS,
RNVQXRP:TQV:SATS, KIPKAXX:VPT:SPIS,
GIPEPXX:VPT:SPIS, SIPKAXX:VPT:SPIS,
HVTKPTX:VPT:SPIS, YVPKPXX:VPT:SPIS,
TVPKPXX:VPT:SPIS, AVPKAXX:VPT:SPIS,
KASKAXX:VPT:SPIS, GSAGPXX:VPT:SPIS,
AAPASXX:VPT:SPIS, STPPTXX:VPT:SPIS,
HVPKPXX:VPT:SPIS, RVPSTXX:VPT:SPIS,
ASAAPXX:VPT:SPIS, ASASPXX:VPT:SPIS,
GIPEPXX:VPE:SPIS, HVTKPTX:APT:SPIS,
YVPKPXX:APT:SPIS, TVPKPXX:APT:SPIS,
AVPKAXX:APT:SPIS, GSAGPXX:TPT:SPIS,
AAPASXX:VPA:SPIS, HVPKPXX:APT:SPIS,
RVPSTXX:APV:SPIS, ASAAPXX:VPQ:SPIS,
ASASPXX:VSQ:SPIS, ASASPXX:VPQ:SPIS,
SSVKXQP:SRV:SPIS, RNVQXRP:TQV:SPIS,
KIPKAXX:VPT:EPIS, GIPEPXX:VPT:EPIS,
SIPKAXX:VPT:EPIS, HVTKPTX:VPT:EPIS,
YVPKPXX:VPT:EPIS, TVPKPXX:VPT:EPIS,
AVPKAXX:VPT:EPIS, KVGKAXX:VPT:EPIS,
GSAGPXX:VPT:EPIS, AAPASXX:VPT:EPIS,
STPPTXX:VPT:EPIS, HVPKPXX:VPT:EPIS,
RVPSTXX:VPT:EPIS, ASAAPXX:VPT:EPIS,
ASASPXX:VPT:EPIS, GIPEPXX:VPE:EPIS,
HVTKPTX:APT:EPIS, YVPKPXX:APT:EPIS,
TVPKPXX:APT:EPIS, AVPKAXX:APT:EPIS,
GSAGPXX:TPT:EPIS, AAPASXX:VPA:EPIS,
HVPKPXX:APT:EPIS, RVPSTXX:APV:EPIS,
ASAAPXX:VPQ:EPIS, ASASPXX:VSQ:EPIS,
ASASPXX:VPQ:EPIS, SSVKXQP:SRV:EPIS,
RNVQXRP:TQV:EPIS, KIPKAXX:TPT:SPIN,
GIPEPXX:TPT:SPIN, SIPKAXX:TPT:SPIN,
HVTKPTX:TPT:SPIN, YVPKPXX:TPT:SPIN,
TVPKPXX:TPT:SPIN, AVPKAXX:TPT:SPIN,
KVGKAXX:TPT:SPIN, KASKAXX:TPT:SPIN,
AAPASXX:TPT:SPIN, STPPTXX:TPT:SPIN,
HVPKPXX:TPT:SPIN, RVPSTXX:TPT:SPIN,
ASAAPXX:TPT:SPIN, ASASPXX:TPT:SPIN,
KIPKAXX:VPT:SPIN, GIPEPXX:VPE:SPIN,
SIPKAXX:VPT:SPIN, HVTKPTX:APT:SPIN,
YVPKPXX:APT:SPIN, TVPKPXX:APT:SPIN,
AVPKAXX:APT:SPIN, KVGKAXX:VPT:SPIN,
KASKAXX:VPT:SPIN, AAPASXX:VPA:SPIN,
STPPTXX:VPT:SPIN, HVPKPXX:APT:SPIN,
RVPSTXX:APV:SPIN, ASAAPXX:VPQ:SPIN,
ASASPXX:VSQ:SPIN, ASASPXX:VPQ:SPIN,
NDEGLEX:VPT:SPIN, SSVKXQP:SRV:SPIN,
RNVQXRP:TQV:SPIN, KIPKAXX:VPA:SPIS,
GIPEPXX:VPA:SPIS, SIPKAXX:VPA:SPIS,
HVTKPTX:VPA:SPIS, YVPKPXX:VPA:SPIS,
TVPKPXX:VPA:SPIS, AVPKAXX:VPA:SPIS,
KVGKAXX:VPA:SPIS, KASKAXX:VPA:SPIS,
GSAGPXX:VPA:SPIS, STPPTXX:VPA:SPIS,
HVPKPXX:VPA:SPIS, RVPSTXX:VPA:SPIS,
ASAAPXX:VPA:SPIS, ASASPXX:VPA:SPIS,
KVGKAXX:VPT:SPIS, NDEGLEX:VPT:SPIS,
KIPKAXX:APV:KPLS, GIPEPXX:APV:KPLS,
SIPKAXX:APV:KPLS, HVTKPTX:APV:KPLS,
YVPKPXX:APV:KPLS, TVPKPXX:APV:KPLS,
AVPKAXX:APV:KPLS, KVGKAXX:APV:KPLS,
KASKAXX:APV:KPLS, GSAGPXX:APV:KPLS,
AAPASXX:APV:KPLS, STPPTXX:APV:KPLS,
HVPKPXX:APV:KPLS, ASAAPXX:APV:KPLS,
ASASPXX:APV:KPLS, KIPKAXX:VPT:KPLS,
GIPEPXX:VPE:KPLS, SIPKAXX:VPT:KPLS,
HVTKPTX:APT:KPLS, YVPKPXX:APT:KPLS,
TVPKPXX:APT:KPLS, AVPKAXX:APT:KPLS,
KVGKAXX:VPT:KPLS, KASKAXX:VPT:KPLS,
GSAGPXX:TPT:KPLS, AAPASXX:VPA:KPLS,
STPPTXX:VPT:KPLS, HVPKPXX:APT:KPLS,
ASAAPXX:VPQ:KPLS, ASASPXX:VSQ:KPLS,
ASASPXX:VPQ:KPLS, NDEGLEX:VPT:KPLS,
SSVKXQP:SRV:KPLS, RNVQXRP:TQV:KPLS,
KIPKAXX:VPQ:EPLP, GIPEPXX:VPQ:EPLP,
SIPKAXX:VPQ:EPLP, HVTKPTX:VPQ:EPLP,
YVPKPXX:VPQ:EPLP, TVPKPXX:VPQ:EPLP,
AVPKAXX:VPQ:EPLP, KVGKAXX:VPQ:EPLP,
KASKAXX:VPQ:EPLP, GSAGPXX:VPQ:EPLP,
AAPASXX:VPQ:EPLP, STPPTXX:VPQ:EPLP,
HVPKPXX:VPQ:EPLP, RVPSTXX:VPQ:EPLP,
ASASPXX:VPQ:EPLP, KIPKAXX:VPT:EPLP,
GIPEPXX:VPE:EPLP, SIPKAXX:VPT:EPLP,
HVTKPTX:APT:EPLP, YVPKPXX:APT:EPLP,
TVPKPXX:APT:EPLP, AVPKAXX:APT:EPLP,
KVGKAXX:VPT:EPLP, KASKAXX:VPT:EPLP,
GSAGPXX:TPT:EPLP, AAPASXX:VPA:EPLP,
STPPTXX:VPT:EPLP, HVPKPXX:APT:EPLP,
RVPSTXX:APV:EPLP, ASASPXX:VSQ:EPLP,
NDEGLEX:VPT:EPLP, SSVKXQP:SRV:EPLP,
RNVQXRP:TQV:EPLP, KIPKAXX:VSQ:EPLT,
GIPEPXX:VSQ:EPLT, SIPKAXX:VSQ:EPLT,
HVTKPTX:VSQ:EPLT, YVPKPXX:VSQ:EPLT,
TVPKPXX:VSQ:EPLT, AVPKAXX:VSQ:EPLT,
KVGKAXX:VSQ:EPLT, KASKAXX:VSQ:EPLT,
GSAGPXX:VSQ:EPLT, AAPASXX:VSQ:EPLT,
STPPTXX:VSQ:EPLT, HVPKPXX:VSQ:EPLT,
RVPSTXX:VSQ:EPLT, ASAAPXX:VSQ:EPLT,
ASASPXX:VSQ:EPLT, KIPKAXX:VPT:EPLT,
GIPEPXX:VPE:EPLT, SIPKAXX:VPT:EPLT,
HVTKPTX:APT:EPLT, YVPKPXX:APT:EPLT,
TVPKPXX:APT:EPLT, AVPKAXX:APT:EPLT,
KVGKAXX:VPT:EPLT, KASKAXX:VPT:EPLT,
GSAGPXX:TPT:EPLT, AAPASXX:VPA:EPLT,
STPPTXX:VPT:EPLT, HVPKPXX:APT:EPLT,
RVPSTXX:APV:EPLT, ASAAPXX:VPQ:EPLT,
NDEGLEX:VPT:EPLT, SSVKXQP:SRV:EPLT,
RNVQXRP:TQV:EPLT, KIPKAXX:VPQ:EPLT,
GIPEPXX:VPQ:EPLT, SIPKAXX:VPQ:EPLT,
HVTKPTX:VPQ:EPLT, YVPKPXX:VPQ:EPLT,
TVPKPXX:VPQ:EPLT, AVPKAXX:VPQ:EPLT,
KVGKAXX:VPQ:EPLT, KASKAXX:VPQ:EPLT,
GSAGPXX:VPQ:EPLT, AAPASXX:VPQ:EPLT,
STPPTXX:VPQ:EPLT, HVPKPXX:VPQ:EPLT,
RVPSTXX:VPQ:EPLT, ASASPXX:VPQ:EPLT,
NDEGLEX:VPT:SNIT, GIPEPXX:VPE:SNIT,
HVTKPTX:APT:SNIT, YVPKPXX:APT:SNIT,
TVPKPXX:APT:SNIT, AVPKAXX:APT:SNIT,
GSAGPXX:TPT:SNIT, AAPASXX:VPA:SNIT,
HVPKPXX:APT:SNIT, RVPSTXX:APV:SNIT,
ASAAPXX:VPQ:SNIT, ASASPXX:VSQ:SNIT,
ASASPXX:VPQ:SNIT, SSVKXQP:SRV:SNIT,
RNVQXRP:TQV:SNIT, RNVQXRP:SRV:RSVK,
KIPKAXX:VPT:RSVK, GIPEPXX:VPE:RSVK,
SIPKAXX:VPT:RSVK, HVTKPTX:APT:RSVK,
YVPKPXX:APT:RSVK, TVPKPXX:APT:RSVK,
AVPKAXX:APT:RSVK, KVGKAXX:VPT:RSVK,
KASKAXX:VPT:RSVK, GSAGPXX:TPT:RSVK,
AAPASXX:VPA:RSVK, STPPTXX:VPT:RSVK,
HVPKPXX:APT:RSVK, RVPSTXX:APV:RSVK,
ASAAPXX:VPQ:RSVK, ASASPXX:VSQ:RSVK,
ASASPXX:VPQ:RSVK, NDEGLEX:VPT:RSVK,
RNVQXRP:TQV:RSVK, SSVKXQP:TQV:RPVQ,
KIPKAXX:VPT:RPVQ, GIPEPXX:VPE:RPVQ,
SIPKAXX:VPT:RPVQ, HVTKPTX:APT:RPVQ,
YVPKPXX:APT:RPVQ, TVPKPXX:APT:RPVQ,
AVPKAXX:APT:RPVQ, KVGKAXX:VPT:RPVQ,
KASKAXX:VPT:RPVQ, GSAGPXX:TPT:RPVQ,
AAPASXX:VPA:RPVQ, STPPTXX:VPT:RPVQ,
HVPKPXX:APT:RPVQ, RVPSTXX:APV:RPVQ,
ASAAPXX:VPQ:RPVQ, ASASPXX:VSQ:RPVQ,
ASASPXX:VPQ:RPVQ, NDEGLEX:VPT:RPVQ
and
SSVKXQP:SRV:RPVQ.

[0325] In certain embodiments, the triplet PEP7:PEP3:PEP12 is selected from the group consisting of GIPEPXX:VPT:SAIS-AA¹⁷-LYL, HVTKPTX:VPT:SAIS-AA¹⁷-LYL, YVPKPXX:VPT:SAIS-AA¹⁷-LYL, TVPKPXX:VPT:SAIS-AA¹⁷-LYL, AVPKAXX:VPT:SAIS-AA¹⁷-LYL, KVGKAXX:VPT:SAIS-AA¹⁷-LYL, KASKAXX:VPT:SAIS-AA¹⁷-LYL, GSAGPXX:VPT:SAIS-AA¹⁷-LYL, AAPASXX:VPT:SAIS-AA¹⁷-LYL, STPPTXX:VPT:SAIS-AA¹⁷-LYL, HVPKPXX:VPT:SAIS-AA¹⁷-LYL, RVPSTXX:VPT:SAIS-AA¹⁷-LYL, ASAAPXX:VPT:SAIS-AA¹⁷-LYL, ASASPXX:VPT:SAIS-AA¹⁷-LYL, GIPEPXX:VPE:SAIS-AA¹⁷-LYL, HVTKPTX:APT:SAIS-AA¹⁷-LYL, YVPKPXX:APT:SAIS-AA¹⁷-LYL, TVPKPXX:APT:SAIS-AA¹⁷-LYL, AVPKAXX:APT:SAIS-AA¹⁷-LYL, GSAGPXX:TPT:SAIS-AA¹⁷-LYL, AAPASXX:VPA:SAIS-AA¹⁷-LYL, HVPKPXX:APT:SAIS-AA¹⁷-LYL, RVPSTXX:APV:SAIS-AA¹⁷-LYL, ASAAPXX:VPQ:SAIS-AA¹⁷-LYL, ASASPXX:VSQ:SAIS-AA¹⁷-LYL, ASASPXX:VPQ:SAIS-AA¹⁷-LYL, SSVKXQP:SRV:SAIS-AA¹⁷-LYL, RNVQXRP:TQV:SAIS-AA¹⁷-LYL, KIPKAXX:VPE:SSLS-AA¹⁷-LFF, SIPKAXX:VPE:SSLS-AA¹⁷-LFF, HVTKPTX:VPE:SSLS-AA¹⁷-LFF, YVPKPXX:VPE:SSLS-AA¹⁷-LFF, TVPKPXX:VPE:SSLS-AA¹⁷-LFF, AVPKAXX:VPE:SSLS-AA¹⁷-LFF, KVGKAXX:VPE:SSLS-AA¹⁷-LFF, KASKAXX:VPE:SSLS-AA¹⁷-LFF, GSAGPXX:VPE:SSLS-AA¹⁷-LFF, AAPASXX:VPE:SSLS-AA¹⁷-LFF, STPPTXX:VPE:SSLS-AA¹⁷-LFF, HVPKPXX:VPE:SSLS-AA¹⁷-LFF, RVPSTXX:VPE:SSLS-AA¹⁷-LFF, ASAAPXX:VPE:SSLS-AA¹⁷-LFF, ASASPXX:VPE:SSLS-AA¹⁷-LFF, KIPKAXX:VPT:SSLS-AA¹⁷-LFF, SIPKAXX:VPT:SSLS-AA¹⁷-LFF, HVTKPTX:APT:SSLS-AA¹⁷-LFF, YVPKPXX:APT:SSLS-AA¹⁷-LFF, TVPKPXX:APT:SSLS-AA¹⁷-LFF, AVPKAXX:APT:SSLS-AA¹⁷-LFF, KVGKAXX:VPT:SSLS-AA¹⁷-LFF, KASKAXX:VPT:SSLS-AA¹⁷-LFF, GSAGPXX:TPT:SSLS-AA¹⁷-LFF, AAPASXX:VPA:SSLS-AA¹⁷-LFF, STPPTXX:VPT:SSLS-AA¹⁷-LFF, HVPKPXX:APT:SSLS-AA¹⁷-LFF, RVPSTXX:APV:SSLS-AA¹⁷-LFF, ASAAPXX:VPQ:SSLS-AA¹⁷-LFF, ASASPXX:VSQ:SSLS-AA¹⁷-LFF, ASASPXX:VPQ:SSLS-AA¹⁷-LFF, NDEGLEX:VPT:SSLS-AA¹⁷-LFF, SSVKXQP:SRV:SSLS-AA¹⁷-LFF, RNVQXRP:TQV:SSLS-AA¹⁷-LFF, KIPKAXX:APT:NAIS-AA¹⁷-LYF, GIPEPXX:APT:NAIS-AA¹⁷-LYF, SIPKAXX:APT:NAIS-AA¹⁷-LYF, AVPKAXX:APT:NAIS-AA¹⁷-LYF, KVGKAXX:APT:NAIS-AA¹⁷-LYF, KASKAXX:APT:NAIS-AA¹⁷-LYF, GSAGPXX:APT:NAIS-AA¹⁷-LYF, AAPASXX:APT:NAIS-AA¹⁷-LYF, STPPTXX:APT:NAIS-AA¹⁷-LYF, RVPSTXX:APT:NAIS-AA¹⁷-LYF, ASAAPXX:APT:NAIS-AA¹⁷-LYF, ASASPXX:APT:NAIS-AA¹⁷-LYF, KIPKAXX:VPT:NAIS-AA¹⁷-LYF, GIPEPXX:VPE:NAIS-AA¹⁷-LYF, SIPKAXX:VPT:NAIS-AA¹⁷-LYF, KVGKAXX:VPT:NAIS-AA¹⁷-LYF, KASKAXX:VPT:NAIS-AA¹⁷-LYF, GSAGPXX:TPT:NAIS-AA¹⁷-LYF, AAPASXX:VPA:NAIS-AA¹⁷-LYF, STPPTXX:VPT:NAIS-AA¹⁷-LYF, RVPSTXX:APV:NAIS-AA¹⁷-LYF, ASAAPXX:VPQ:NAIS-AA¹⁷-LYF, ASASPXX:VSQ:NAIS-AA¹⁷-LYF, ASASPXX:VPQ:NAIS-AA¹⁷-LYF, NDEGLEX:VPT:NAIS-AA¹⁷-LYF, SSVKXQP:SRV:NAIS-AA¹⁷-LYF, RNVQXRP:TQV:NAIS-AA¹⁷-LYF, KIPKAXX:APT:SATS-AA¹⁷-LYY, GIPEPXX:APT:SATS-AA¹⁷-LYY, SIPKAXX:APT:SATS-AA¹⁷-LYY, HVTKPTX:APT:SATS-AA¹⁷-LYY, YVPKPXX:APT:SATS-AA¹⁷-LYY, TVPKPXX:APT:SATS-AA¹⁷-LYY, KVGKAXX:APT:SATS-AA¹⁷-LYY, KASKAXX:APT:SATS-AA¹⁷-LYY, GSAGPXX:APT:SATS-AA¹⁷-LYY, AAPASXX:APT:SATS-AA¹⁷-LYY, STPPTXX:APT:SATS-AA¹⁷-LYY, HVPKPXX:APT:SATS-AA¹⁷-LYY, RVPSTXX:APT:SATS-AA¹⁷-LYY, ASAAPXX:APT:SATS-AA¹⁷-LYY, ASASPXX:APT:SATS-AA¹⁷-LYY, KIPKAXX:VPT:SATS-AA¹⁷-LYY, GIPEPXX:VPE:SATS-AA¹⁷-LYY, SIPKAXX:VPT:SATS-AA¹⁷-LYY, KVGKAXX:VPT:SATS-AA¹⁷-LYY, KASKAXX:VPT:SATS-AA¹⁷-LYY, GSAGPXX:TPT:SATS-AA¹⁷-LYY, AAPASXX:VPA:SATS-AA¹⁷-LYY, STPPTXX:VPT:SATS-AA¹⁷-LYY, RVPSTXX:APV:SATS-AA¹⁷-LYY, ASAAPXX:VPQ:SATS-AA¹⁷-LYY, ASASPXX:VSQ:SATS-AA¹⁷-LYY, ASASPXX:VPQ:SATS-AA¹⁷-LYY, NDEGLEX:VPT:SATS-AA¹⁷-LYY, SSVKXQP:SRV:SATS-AA¹⁷-LYY, RNVQXRP:TQV:SATS-AA¹⁷-LYY, KIPKAXX:VPT:SPIS-AA¹⁷-LYK, GIPEPXX:VPT:SPIS-AA¹⁷-LYK, SIPKAXX:VPT:SPIS-AA¹⁷-LYK, HVTKPTX:VPT:SPIS-AA¹⁷-LYK, YVPKPXX:VPT:SPIS-AA¹⁷-LYK, TVPKPXX:VPT:SPIS-AA¹⁷-LYK, AVPKAXX:VPT:SPIS-AA¹⁷-LYK, KASKAXX:VPT:SPIS-AA¹⁷-LYK, GSAGPXX:VPT:SPIS-AA¹⁷-LYK, AAPASXX:VPT:SPIS-AA¹⁷-LYK, STPPTXX:VPT:SPIS-AA¹⁷-LYK, HVPKPXX:VPT:SPIS-AA¹⁷-LYK, RVPSTXX:VPT:SPIS-AA¹⁷-LYK, ASAAPXX:VPT:SPIS-AA¹⁷-LYK, ASASPXX:VPT:SPIS-AA¹⁷-LYK, GIPEPXX:VPE:SPIS-AA¹⁷-LYK, HVTKPTX:APT:SPIS-AA¹⁷-LYK, YVPKPXX:APT:SPIS-AA¹⁷-LYK, TVPKPXX:APT:SPIS-AA¹⁷-LYK, AVPKAXX:APT:SPIS-AA¹⁷-LYK, GSAGPXX:TPT:SPIS-AA¹⁷-LYK, AAPASXX:VPA:SPIS-AA¹⁷-LYK, HVPKPXX:APT:SPIS-AA¹⁷-LYK, RVPSTXX:APV:SPIS-AA¹⁷-LYK, ASAAPXX:VPQ:SPIS-AA¹⁷-LYK, ASASPXX:VSQ:SPIS-AA¹⁷-LYK, ASASPXX:VPQ:SPIS-AA¹⁷-LYK, SSVKXQP:SRV:SPIS-AA¹⁷-LYK, RNVQXRP:TQV:SPIS-AA¹⁷-LYK, KIPKAXX:VPT:EPIS-AA¹⁷-LYL, GIPEPXX:VPT:EPIS-AA¹⁷-LYL, SIPKAXX:VPT:EPIS-AA¹⁷-LYL, HVTKPTX:VPT:EPIS-AA¹⁷-LYL, YVPKPXX:VPT:EPIS-AA¹⁷-LYL, TVPKPXX:VPT:EPIS-AA¹⁷-LYL, AVPKAXX:VPT:EPIS-AA¹⁷-LYL, KVGKAXX:VPT:EPIS-AA¹⁷-LYL, GSAGPXX:VPT:EPIS-AA¹⁷-LYL, AAPASXX:VPT:EPIS-AA¹⁷-LYL, STPPTXX:VPT:EPIS-AA¹⁷-LYL, HVPKPXX:VPT:EPIS-AA¹⁷-LYL, RVPSTXX:VPT:EPIS-AA¹⁷-LYL, ASAAPXX:VPT:EPIS-AA¹⁷-LYL, ASASPXX:VPT:EPIS-AA¹⁷-LYL, GIPEPXX:VPE:EPIS-AA¹⁷-LYL, HVTKPTX:APT:EPIS-AA¹⁷-LYL, YVPKPXX:APT:EPIS-AA¹⁷-LYL, TVPKPXX:APT:EPIS-AA¹⁷-LYL, AVPKAXX:APT:EPIS-AA¹⁷-LYL, GSAGPXX:TPT:EPIS-AA¹⁷-LYL, AAPASXX:VPA:EPIS-AA¹⁷-LYL, HVPKPXX:APT:EPIS-AA¹⁷-LYL, RVPSTXX:APV:EPIS-AA¹⁷-LYL, ASAAPXX:VPQ:EPIS-AA¹⁷-LYL, ASASPXX:VSQ:EPIS-AA¹⁷-LYL, ASASPXX:VPQ:EPIS-AA¹⁷-LYL, SSVKXQP:SRV:EPIS-AA¹⁷-LYL, RNVQXRP:TQV:EPIS-AA¹⁷-LYL, KIPKAXX:TPT:SPIN-AA¹⁷-LYF, GIPEPXX:TPT:SPIN-AA¹⁷-LYF, SIPKAXX:TPT:SPIN-AA¹⁷-LYF, HVTKPTX:TPT:SPIN-AA¹⁷-LYF, YVPKPXX:TPT:SPIN-AA¹⁷-LYF, TVPKPXX:TPT:SPIN-AA¹⁷-LYF, AVPKAXX:TPT:SPIN-AA¹⁷-LYF, KVGKAXX:TPT:SPIN-AA¹⁷-LYF, KASKAXX:TPT:SPIN-AA¹⁷-LYF, AAPASXX:TPT:SPIN-AA¹⁷-LYF, STPPTXX:TPT:SPIN-AA¹⁷-LYF, HVPKPXX:TPT:SPIN-AA¹⁷-LYF, RVPSTXX:TPT:SPIN-AA¹⁷-LYF, ASAAPXX:TPT:SPIN-AA¹⁷-LYF, ASASPXX:TPT:SPIN-AA¹⁷-LYF, KIPKAXX:VPT:SPIN-AA¹⁷-LYF, GIPEPXX:VPE:SPIN-AA¹⁷-LYF, SIPKAXX:VPT:SPIN-AA¹⁷-LYF, HVTKPTX:APT:SPIN-AA¹⁷-LYF, YVPKPXX:APT:SPIN-AA¹⁷-LYF, TVPKPXX:APT:SPIN-AA¹⁷-LYF, AVPKAXX:APT:SPIN-AA¹⁷-LYF, KVGKAXX:VPT:SPIN-AA¹⁷-LYF, KASKAXX:VPT:SPIN-AA¹⁷-LYF, AAPASXX:VPA:SPIN-AA¹⁷-LYF, STPPTXX:VPT:SPIN-AA¹⁷-LYF, HVPKPXX:APT:SPIN-AA¹⁷-LYF, RVPSTXX:APV:SPIN-AA¹⁷-LYF, ASAAPXX:VPQ:SPIN-AA¹⁷-LYF, ASASPXX:VSQ:SPIN-AA¹⁷-LYF, ASASPXX:VPQ:SPIN-AA¹⁷-LYF, NDEGLEX:VPT:SPIN-AA¹⁷-LYF, SSVKXQP:SRV:SPIN-AA¹⁷-LYF, RNVQXRP:TQV:SPIN-AA¹⁷-LYF, KIPKAXX:VPA:SPIS-AA¹⁷-LYI, GIPEPXX:VPA:SPIS-AA¹⁷-LYI, SIPKAXX:VPA:SPIS-AA¹⁷-LYI, HVTKPTX:VPA:SPIS-AA¹⁷-LYI, YVPKPXX:VPA:SPIS-AA¹⁷-LYI, TVPKPXX:VPA:SPIS-AA¹⁷-LYI, AVPKAXX:VPA:SPIS-AA¹⁷-LYI, KVGKAXX:VPA:SPIS-AA¹⁷-LYI, KASKAXX:VPA:SPIS-AA¹⁷-LYI, GSAGPXX:VPA:SPIS-AA¹⁷-LYI, STPPTXX:VPA:SPIS-AA¹⁷-LYI, HVPKPXX:VPA:SPIS-AA¹⁷-LYI, RVPSTXX:VPA:SPIS-AA¹⁷-LYI, ASAAPXX:VPA:SPIS-AA¹⁷-LYI, ASASPXX:VPA:SPIS-AA¹⁷-LYI, KIPKAXX:VPT:SPIS-AA¹⁷-LYI, GIPEPXX:VPE:SPIS-AA¹⁷-LYI, SIPKAXX:VPT:SPIS-AA¹⁷-LYI, HVTKPTX:APT:SPIS-AA¹⁷-LYI, YVPKPXX:APT:SPIS-AA¹⁷-LYI, TVPKPXX:APT:SPIS-AA¹⁷-LYI, AVPKAXX:APT:SPIS-AA¹⁷-LYI, KVGKAXX:VPT:SPIS-AA¹⁷-LYI, KASKAXX:VPT:SPIS-AA¹⁷-LYI, GSAGPXX:TPT:SPIS-AA¹⁷-LYI, STPPTXX:VPT:SPIS-AA¹⁷-LYI, HVPKPXX:APT:SPIS-AA¹⁷-LYI, RVPSTXX:APV:SPIS-AA¹⁷-LYI, ASAAPXX:VPQ:SPIS-AA¹⁷-LYI, ASASPXX:VSQ:SPIS-AA¹⁷-LYI, ASASPXX:VPQ:SPIS-AA¹⁷-LYI, NDEGLEX:VPT:SPIS-AA¹⁷-LYI, SSVKXQP:SRV:SPIS-AA¹⁷-LYI, RNVQXRP:TQV:SPIS-AA¹⁷-LYI, KIPKAXX:VPT:SPIS-AA¹⁷-LFI, GIPEPXX:VPT:SPIS-AA¹⁷-LFI, SIPKAXX:VPT:SPIS-AA¹⁷-LFI, HVTKPTX:VPT:SPIS-AA¹⁷-LFI, YVPKPXX:VPT:SPIS-AA¹⁷-LFI, TVPKPXX:VPT:SPIS-AA¹⁷-LFI, AVPKAXX:VPT:SPIS-AA¹⁷-LFI, KVGKAXX:VPT:SPIS-AA¹⁷-LFI, KASKAXX:VPT:SPIS-AA¹⁷-LFI, GSAGPXX:VPT:SPIS-AA¹⁷-LFI, AAPASXX:VPT:SPIS-AA¹⁷-LFI, HVPKPXX:VPT:SPIS-AA¹⁷-LFI, RVPSTXX:VPT:SPIS-AA¹⁷-LFI, ASAAPXX:VPT:SPIS-AA¹⁷-LFI, ASASPXX:VPT:SPIS-AA¹⁷-LFI, GIPEPXX:VPE:SPIS-AA¹⁷-LFI, HVTKPTX:APT:SPIS-AA¹⁷-LFI, YVPKPXX:APT:SPIS-AA¹⁷-LFI, TVPKPXX:APT:SPIS-AA¹⁷-LFI, AVPKAXX:APT:SPIS-AA¹⁷-LFI, GSAGPXX:TPT:SPIS-AA¹⁷-LFI, AAPASXX:VPA:SPIS-AA¹⁷-LFI, HVPKPXX:APT:SPIS-AA¹⁷-LFI, RVPSTXX:APV:SPIS-AA¹⁷-LFI, ASAAPXX:VPQ:SPIS-AA¹⁷-LFI, ASASPXX:VSQ:SPIS-AA¹⁷-LFI, ASASPXX:VPQ:SPIS-AA¹⁷-LFI, SSVKXQP:SRV:SPIS-AA¹⁷-LFI, RNVQXRP:TQV:SPIS-AA¹⁷-LFI, KIPKAXX:APV:KPLS-AA¹⁷-LYV, GIPEPXX:APV:KPLS-AA¹⁷-LYV, SIPKAXX:APV:KPLS-AA¹⁷-LYV, HVTKPTX:APV:KPLS-AA¹⁷-LYV, YVPKPXX:APV:KPLS-AA¹⁷-LYV, TVPKPXX:APV:KPLS-AA¹⁷-LYV, AVPKAXX:APV:KPLS-AA¹⁷-LYV, KVGKAXX:APV:KPLS-AA¹⁷-LYV, KASKAXX:APV:KPLS-AA¹⁷-LYV, GSAGPXX:APV:KPLS-AA¹⁷-LYV, AAPASXX:APV:KPLS-AA¹⁷-LYV, STPPTXX:APV:KPLS-AA¹⁷-LYV, HVPKPXX:APV:KPLS-AA¹⁷-LYV, ASAAPXX:APV:KPLS-AA¹⁷-LYV, ASASPXX:APV:KPLS-AA¹⁷-LYV, KIPKAXX:VPT:KPLS-AA¹⁷-LYV, GIPEPXX:VPE:KPLS-AA¹⁷-LYV, SIPKAXX:VPT:KPLS-AA¹⁷-LYV, HVTKPTX:APT:KPLS-AA¹⁷-LYV, YVPKPXX:APT:KPLS-AA¹⁷-LYV, TVPKPXX:APT:KPLS-AA¹⁷-LYV, AVPKAXX:APT:KPLS-AA¹⁷-LYV, KVGKAXX:VPT:KPLS-AA¹⁷-LYV, KASKAXX:VPT:KPLS-AA¹⁷-LYV, GSAGPXX:TPT:KPLS-AA¹⁷-LYV, AAPASXX:VPA:KPLS-AA¹⁷-LYV, STPPTXX:VPT:KPLS-AA¹⁷-LYV, HVPKPXX:APT:KPLS-AA¹⁷-LYV, ASAAPXX:VPQ:KPLS-AA¹⁷-LYV, ASASPXX:VSQ:KPLS-AA¹⁷-LYV, ASASPXX:VPQ:KPLS-AA¹⁷-LYV, NDEGLEX:VPT:KPLS-AA¹⁷-LYV, SSVKXQP:SRV:KPLS-AA¹⁷-LYV, RNVQXRP:TQV:KPLS-AA¹⁷-LYV, KIPKAXX:VPQ:EPLP-AA¹⁷-VYY, GIPEPXX:VPQ:EPLP-AA¹⁷-VYY, SIPKAXX:VPQ:EPLP-AA¹⁷-VYY, HVTKPTX:VPQ:EPLP-AA¹⁷-VYY, YVPKPXX:VPQ:EPLP-AA¹⁷-VYY, TVPKPXX:VPQ:EPLP-AA¹⁷-VYY, AVPKAXX:VPQ:EPLP-AA¹⁷-VYY, KVGKAXX:VPQ:EPLP-AA¹⁷-VYY, KASKAXX:VPQ:EPLP-AA¹⁷-VYY, GSAGPXX:VPQ:EPLP-AA¹⁷-VYY, AAPASXX:VPQ:EPLP-AA¹⁷-VYY, STPPTXX:VPQ:EPLP-AA¹⁷-VYY, HVPKPXX:VPQ:EPLP-AA¹⁷-VYY, RVPSTXX:VPQ:EPLP-AA¹⁷-VYY, ASASPXX:VPQ:EPLP-AA¹⁷-VYY, KIPKAXX:VPT:EPLP-AA¹⁷-VYY, GIPEPXX:VPE:EPLP-AA¹⁷-VYY, SIPKAXX:VPT:EPLP-AA¹⁷-VYY, HVTKPTX:APT:EPLP-AA¹⁷-VYY, YVPKPXX:APT:EPLP-AA¹⁷-VYY, TVPKPXX:APT:EPLP-AA¹⁷-VYY, AVPKAXX:APT:EPLP-AA¹⁷-VYY, KVGKAXX:VPT:EPLP-AA¹⁷-VYY, KASKAXX:VPT:EPLP-AA¹⁷-VYY, GSAGPXX:TPT:EPLP-AA¹⁷-VYY, AAPASXX:VPA:EPLP-AA¹⁷-VYY, STPPTXX:VPT:EPLP-AA¹⁷-VYY, HVPKPXX:APT:EPLP-AA¹⁷-VYY, RVPSTXX:APV:EPLP-AA¹⁷-VYY, ASASPXX:VSQ:EPLP-AA¹⁷-VYY, NDEGLEX:VPT:EPLP-AA¹⁷-VYY, SSVKXQP:SRV:EPLP-AA¹⁷-VYY, RNVQXRP:TQV:EPLP-AA¹⁷-VYY, KIPKAXX:VSQ:EPLT-AA¹⁷-LYY, GIPEPXX:VSQ:EPLT-AA¹⁷-LYY, SIPKAXX:VSQ:EPLT-AA¹⁷-LYY, HVTKPTX:VSQ:EPLT-AA¹⁷-LYY, YVPKPXX:VSQ:EPLT-AA¹⁷-LYY, TVPKPXX:VSQ:EPLT-AA¹⁷-LYY, AVPKAXX:VSQ:EPLT-AA¹⁷-LYY, KVGKAXX:VSQ:EPLT-AA¹⁷-LYY, KASKAXX:VSQ:EPLT-AA¹⁷-LYY, GSAGPXX:VSQ:EPLT-AA¹⁷-LYY, AAPASXX:VSQ:EPLT-AA¹⁷-LYY, STPPTXX:VSQ:EPLT-AA¹⁷-LYY, HVPKPXX:VSQ:EPLT-AA¹⁷-LYY, RVPSTXX:VSQ:EPLT-AA¹⁷-LYY, ASAAPXX:VSQ:EPLT-AA¹⁷-LYY, ASASPXX:VSQ:EPLT-AA¹⁷-LYY, KIPKAXX:VPT:EPLT-AA¹⁷-LYY, GIPEPXX:VPE:EPLT-AA¹⁷-LYY, SIPKAXX:VPT:EPLT-AA¹⁷-LYY, HVTKPTX:APT:EPLT-AA¹⁷-LYY, YVPKPXX:APT:EPLT-AA¹⁷-LYY, TVPKPXX:APT:EPLT-AA¹⁷-LYY, AVPKAXX:APT:EPLT-AA¹⁷-LYY, KVGKAXX:VPT:EPLT-AA¹⁷-LYY, KASKAXX:VPT:EPLT-AA¹⁷-LYY, GSAGPXX:TPT:EPLT-AA¹⁷-LYY, AAPASXX:VPA:EPLT-AA¹⁷-LYY, STPPTXX:VPT:EPLT-AA¹⁷-LYY, HVPKPXX:APT:EPLT-AA¹⁷-LYY, RVPSTXX:APV:EPLT-AA¹⁷-LYY, ASAAPXX:VPQ:EPLT-AA¹⁷-LYY, NDEGLEX:VPT:EPLT-AA¹⁷-LYY, SSVKXQP:SRV:EPLT-AA¹⁷-LYY, RNVQXRP:TQV:EPLT-AA¹⁷-LYY, KIPKAXX:VPQ:EPLT-AA¹⁷-LYY, GIPEPXX:VPQ:EPLT-AA¹⁷-LYY, SIPKAXX:VPQ:EPLT-AA¹⁷-LYY, HVTKPTX:VPQ:EPLT-AA¹⁷-LYY, YVPKPXX:VPQ:EPLT-AA¹⁷-LYY, TVPKPXX:VPQ:EPLT-AA¹⁷-LYY, AVPKAXX:VPQ:EPLT-AA¹⁷-LYY, KVGKAXX:VPQ:EPLT-AA¹⁷-LYY, KASKAXX:VPQ:EPLT-AA¹⁷-LYY, GSAGPXX:VPQ:EPLT-AA¹⁷-LYY, AAPASXX:VPQ:EPLT-AA¹⁷-LYY, STPPTXX:VPQ:EPLT-AA¹⁷-LYY, HVPKPXX:VPQ:EPLT-AA¹⁷-LYY, RVPSTXX:VPQ:EPLT-AA¹⁷-LYY, ASASPXX:VPQ:EPLT-AA¹⁷-LYY, NDEGLEX:VPT:SNIT-AA¹⁷-QIM, GIPEPXX:VPE:SNIT-AA¹⁷-QIM, HVTKPTX:APT:SNIT-AA¹⁷-QIM, YVPKPXX:APT:SNIT-AA¹⁷-QIM, TVPKPXX:APT:SNIT-AA¹⁷-QIM, AVPKAXX:APT:SNIT-AA¹⁷-QIM, GSAGPXX:TPT:SNIT-AA¹⁷-QIM, AAPASXX:VPA:SNIT-AA¹⁷-QIM, HVPKPXX:APT:SNIT-AA¹⁷-QIM, RVPSTXX:APV:SNIT-AA¹⁷-QIM, ASAAPXX:VPQ:SNIT-AA¹⁷-QIM, ASASPXX:VSQ:SNIT-AA¹⁷-QIM, ASASPXX:VPQ:SNIT-AA¹⁷-QIM, SSVKXQP:SRV:SNIT-AA¹⁷-QIM, RNVQXRP:TQV:SNIT-AA¹⁷-QIM, RNVQXRP:SRV:RSVK-AA¹⁷-AKV, KIPKAXX:VPT:RSVK-AA¹⁷-AKV, GIPEPXX:VPE:RSVK-AA¹⁷-AKV, SIPKAXX:VPT:RSVK-AA¹⁷-AKV, HVTKPTX:APT:RSVK-AA¹⁷-AKV, YVPKPXX:APT:RSVK-AA¹⁷-AKV, TVPKPXX:APT:RSVK-AA¹⁷-AKV, AVPKAXX:APT:RSVK-AA¹⁷-AKV, KVGKAXX:VPT:RSVK-AA¹⁷-AKV, KASKAXX:VPT:RSVK-AA¹⁷-AKV, GSAGPXX:TPT:RSVK-AA¹⁷-AKV, AAPASXX:VPA:RSVK-AA¹⁷-AKV, STPPTXX:VPT:RSVK-AA¹⁷-AKV, HVPKPXX:APT:RSVK-AA¹⁷-AKV, RVPSTXX:APV:RSVK-AA¹⁷-AKV, ASAAPXX:VPQ:RSVK-AA¹⁷-AKV, ASASPXX:VSQ:RSVK-AA¹⁷-AKV, ASASPXX:VPQ:RSVK-AA¹⁷-AKV, NDEGLEX:VPT:RSVK-AA¹⁷-AKV, RNVQXRP:TQV:RSVK-AA¹⁷-AKV, SSVKXQP:TQV:RPVQ-AA¹⁷-RKI, KIPKAXX:VPT:RPVQ-AA¹⁷-RKI, GIPEPXX:VPE:RPVQ-AA¹⁷-RKI, SIPKAXX:VPT:RPVQ-AA¹⁷-RKI, HVTKPTX:APT:RPVQ-AA¹⁷-RKI, YVPKPXX:APT:RPVQ-AA¹⁷-RKI, TVPKPXX:APT:RPVQ-AA¹⁷-RKI, AVPKAXX:APT:RPVQ-AA¹⁷-RKI, KVGKAXX:VPT:RPVQ-AA¹⁷-RKI, KASKAXX:VPT:RPVQ-AA¹⁷-RKI, GSAGPXX:TPT:RPVQ-AA¹⁷-RKI, AAPASXX:VPA:RPVQ-AA¹⁷-RKI, STPPTXX:VPT:RPVQ-AA¹⁷-RKI, HVPKPXX:APT:RPVQ-AA¹⁷-RKI, RVPSTXX:APV:RPVQ-AA¹⁷-RKI, ASAAPXX:VPQ:RPVQ-AA¹⁷-RKI, ASASPXX:VSQ:RPVQ-AA¹⁷-RKI, ASASPXX:VPQ:RPVQ-AA¹⁷-RKI, NDEGLEX:VPT:RPVQ-AA¹⁷-RKI and SSVKXQP:SRV:RPVQ-AA¹⁷-RKI; and wherein AA¹⁷ is selected from the group consisting of G, A, V, L, I, P, F, M, W, T and S (in particular is selected from the group consisting of M, I, L, V and T).

[0326] In certain embodiments, the triplet PEP7:PEP5:PEP1 is selected from the group consisting of

GIPEPXX:VPTKM:SAIS, HVTKPTX:VPTKL:SAIS,
YVPKPXX:VPTKL:SAIS, TVPKPXX:VPTQL:SAIS,
AVPKAXX:VPTKL:SAIS, KVGKAXX:VPTKL:SAIS,
KASKAXX:VPTKL:SAIS, GSAGPXX:VPTKM:SAIS,
AAPASXX:VPTRL:SAIS, STPPTXX:VPTRL:SAIS,
HVPKPXX:VPTKL:SAIS, RVPSTXX:VPTKT:SAIS,
ASAAPXX:VPTAL:SAIS, ASASPXX:VPTDL:SAIS,
GIPEPXX:VPEKM:SAIS, HVTKPTX:APTKL:SAIS,
YVPKPXX:APTKL:SAIS, TVPKPXX:APTQL:SAIS,
AVPKAXX:APTKL:SAIS, GSAGPXX:TPTKM:SAIS,
AAPASXX:VPARL:SAIS, HVPKPXX:APTKL:SAIS,
RVPSTXX:APVKT:SAIS, ASAAPXX:VPQAL:SAIS,
ASASPXX:VSQDL:SAIS, ASASPXX:VPQDL:SAIS,
SSVKXQP:SRVHH:SAIS, RNVQXRP:TQVQL:SAIS,
KIPKAXX:VPEEL:SSLS, SIPKAXX:VPEEL:SSLS,
HVTKPTX:VPEKL:SSLS, YVPKPXX:VPEKL:SSLS,
TVPKPXX:VPEQL:SSLS, AVPKAXX:VPEKL:SSLS,
KVGKAXX:VPEKL:SSLS, KASKAXX:VPEKL:SSLS,
GSAGPXX:VPEKM:SSLS, AAPASXX:VPERL:SSLS,
STPPTXX:VPERL:SSLS, HVPKPXX:VPEKL:SSLS,
RVPSTXX:VPEKT:SSLS, ASAAPXX:VPEAL:SSLS,
ASASPXX:VPEDL:SSLS, KIPKAXX:VPTEL:SSLS,
SIPKAXX:VPTEL:SSLS, HVTKPTX:APTKL:SSLS,
YVPKPXX:APTKL:SSLS, TVPKPXX:APTQL:SSLS,
AVPKAXX:APTKL:SSLS, KVGKAXX:VPTKL:SSLS,
KASKAXX:VPTKL:SSLS, GSAGPXX:TPTKM:SSLS,
AAPASXX:VPARL:SSLS, STPPTXX:VPTRL:SSLS,
HVPKPXX:APTKL:SSLS, RVPSTXX:APVKT:SSLS,
ASAAPXX:VPQAL:SSLS, ASASPXX:VSQDL:SSLS,
ASASPXX:VPQDL:SSLS, NDEGLEX:VPTEE:SSLS,
NDEGLEX:VPTGQ:SSLS, SSVKXQP:SRVHH:SSLS,
RNVQXRP:TQVQL:SSLS, KIPKAXX:APTEL:NAIS,
GIPEPXX:APTKM:NAIS, SIPKAXX:APTEL:NAIS,
AVPKAXX:APTKL:NAIS, KVGKAXX:APTKL:NAIS,
KASKAXX:APTKL:NAIS, GSAGPXX:APTKM:NAIS,
AAPASXX:APTRL:NAIS, STPPTXX:APTRL:NAIS,
RVPSTXX:APTKT:NAIS, ASAAPXX:APTAL:NAIS,
ASASPXX:APTDL:NAIS, KIPKAXX:VPTEL:NAIS,
GIPEPXX:VPEKM:NAIS, SIPKAXX:VPTEL:NAIS,
KVGKAXX:VPTKL:NAIS, KASKAXX:VPTKL:NAIS,
GSAGPXX:TPTKM:NAIS, AAPASXX:VPARL:NAIS,
STPPTXX:VPTRL:NAIS, RVPSTXX:APVKT:NAIS,
ASAAPXX:VPQAL:NAIS, ASASPXX:VSQDL:NAIS,
ASASPXX:VPQDL:NAIS, NDEGLEX:VPTEE:NAIS,
NDEGLEX:VPTGQ:NAIS, SSVKXQP:SRVHH:NAIS,
RNVQXRP:TQVQL:NAIS, KIPKAXX:APTEL:SATS,
GIPEPXX:APTKM:SATS, SIPKAXX:APTEL:SATS,
HVTKPTX:APTKL:SATS, YVPKPXX:APTKL:SATS,
TVPKPXX:APTQL:SATS, KVGKAXX:APTKL:SATS,
KASKAXX:APTKL:SATS, GSAGPXX:APTKM:SATS,
AAPASXX:APTRL:SATS, STPPTXX:APTRL:SATS,
HVPKPXX:APTKL:SATS, RVPSTXX:APTKT:SATS,
ASAAPXX:APTAL:SATS, ASASPXX:APTDL:SATS,
KIPKAXX:VPTEL:SATS, GIPEPXX:VPEKM:SATS,
SIPKAXX:VPTEL:SATS, KVGKAXX:VPTKL:SATS,
KASKAXX:VPTKL:SATS, GSAGPXX:TPTKM:SATS,
AAPASXX:VPARL:SATS, STPPTXX:VPTRL:SATS,
RVPSTXX:APVKT:SATS, ASAAPXX:VPQAL:SATS,
ASASPXX:VSQDL:SATS, ASASPXX:VPQDL:SATS,
NDEGLEX:VPTEE:SATS, NDEGLEX:VPTGQ:SATS,
SSVKXQP:SRVHH:SATS, RNVQXRP:TQVQL:SATS,
KIPKAXX:VPTEL:SPIS, GIPEPXX:VPTKM:SPIS,
SIPKAXX:VPTEL:SPIS, HVTKPTX:VPTKL:SPIS,
YVPKPXX:VPTKL:SPIS, TVPKPXX:VPTQL:SPIS,
AVPKAXX:VPTKL:SPIS, KASKAXX:VPTKL:SPIS,
GSAGPXX:VPTKM:SPIS, AAPASXX:VPTRL:SPIS,
STPPTXX:VPTRL:SPIS, HVPKPXX:VPTKL:SPIS,
RVPSTXX:VPTKT:SPIS, ASAAPXX:VPTAL:SPIS,
ASASPXX:VPTDL:SPIS, GIPEPXX:VPEKM:SPIS,
HVTKPTX:APTKL:SPIS, YVPKPXX:APTKL:SPIS,
TVPKPXX:APTQL:SPIS, AVPKAXX:APTKL:SPIS,
GSAGPXX:TPTKM:SPIS, AAPASXX:VPARL:SPIS,
HVPKPXX:APTKL:SPIS, RVPSTXX:APVKT:SPIS,
ASAAPXX:VPQAL:SPIS, ASASPXX:VSQDL:SPIS,
ASASPXX:VPQDL:SPIS, SSVKXQP:SRVHH:SPIS,
RNVQXRP:TQVQL:SPIS, KIPKAXX:VPTEL:EPIS,
GIPEPXX:VPTKM:EPIS, SIPKAXX:VPTEL:EPIS,
HVTKPTX:VPTKL:EPIS, YVPKPXX:VPTKL:EPIS,
TVPKPXX:VPTQL:EPIS, AVPKAXX:VPTKL:EPIS,
KVGKAXX:VPTKL:EPIS, GSAGPXX:VPTKM:EPIS,
AAPASXX:VPTRL:EPIS, STPPTXX:VPTRL:EPIS,
HVPKPXX:VPTKL:EPIS, RVPSTXX:VPTKT:EPIS,
ASAAPXX:VPTAL:EPIS, ASASPXX:VPTDL:EPIS,
GIPEPXX:VPEKM:EPIS, HVTKPTX:APTKL:EPIS,
YVPKPXX:APTKL:EPIS, TVPKPXX:APTQL:EPIS,
AVPKAXX:APTKL:EPIS, GSAGPXX:TPTKM:EPIS,
AAPASXX:VPARL:EPIS, HVPKPXX:APTKL:EPIS,
RVPSTXX:APVKT:EPIS, ASAAPXX:VPQAL:EPIS,
ASASPXX:VSQDL:EPIS, ASASPXX:VPQDL:EPIS,
SSVKXQP:SRVHH:EPIS, RNVQXRP:TQVQL:EPIS,
KIPKAXX:TPTEL:SPIN, GIPEPXX:TPTKM:SPIN,
SIPKAXX:TPTEL:SPIN, HVTKPTX:TPTKL:SPIN,
YVPKPXX:TPTKL:SPIN, TVPKPXX:TPTQL:SPIN,
AVPKAXX:TPTKL:SPIN, KVGKAXX:TPTKL:SPIN,
KASKAXX:TPTKL:SPIN, AAPASXX:TPTRL:SPIN,
STPPTXX:TPTRL:SPIN, HVPKPXX:TPTKL:SPIN,
RVPSTXX:TPTKT:SPIN, ASAAPXX:TPTAL:SPIN,
ASASPXX:TPTDL:SPIN, KIPKAXX:VPTEL:SPIN,
GIPEPXX:VPEKM:SPIN, SIPKAXX:VPTEL:SPIN,
HVTKPTX:APTKL:SPIN, YVPKPXX:APTKL:SPIN,
TVPKPXX:APTQL:SPIN, AVPKAXX:APTKL:SPIN,
KVGKAXX:VPTKL:SPIN, KASKAXX:VPTKL:SPIN,
AAPASXX:VPARL:SPIN, STPPTXX:VPTRL:SPIN,
HVPKPXX:APTKL:SPIN, RVPSTXX:APVKT:SPIN,
ASAAPXX:VPQAL:SPIN, ASASPXX:VSQDL:SPIN,
ASASPXX:VPQDL:SPIN, NDEGLEX:VPTEE:SPIN,
NDEGLEX:VPTGQ:SPIN, SSVKXQP:SRVHH:SPIN,
RNVQXRP:TQVQL:SPIN, KIPKAXX:VPAEL:SPIS,
GIPEPXX:VPAKM:SPIS, SIPKAXX:VPAEL:SPIS,
HVTKPTX:VPAKL:SPIS, YVPKPXX:VPAKL:SPIS,
TVPKPXX:VPAQL:SPIS, AVPKAXX:VPAKL:SPIS,
KVGKAXX:VPAKL:SPIS, KASKAXX:VPAKL:SPIS,
GSAGPXX:VPAKM:SPIS, STPPTXX:VPARL:SPIS,
HVPKPXX:VPAKL:SPIS, RVPSTXX:VPAKT:SPIS,
ASAAPXX:VPAAL:SPIS, ASASPXX:VPADL:SPIS,
KVGKAXX:VPTKL:SPIS, NDEGLEX:VPTEE:SPIS,
NDEGLEX:VPTGQ:SPIS, KIPKAXX:APVEL:KPLS,
GIPEPXX:APVKM:KPLS, SIPKAXX:APVEL:KPLS,
HVTKPTX:APVKL:KPLS, YVPKPXX:APVKL:KPLS,
TVPKPXX:APVQL:KPLS, AVPKAXX:APVKL:KPLS,
KVGKAXX:APVKL:KPLS, KASKAXX:APVKL:KPLS,
GSAGPXX:APVKM:KPLS, AAPASXX:APVRL:KPLS,
STPPTXX:APVRL:KPLS, HVPKPXX:APVKL:KPLS,
ASAAPXX:APVAL:KPLS, ASASPXX:APVDL:KPLS,
KIPKAXX:VPTEL:KPLS, GIPEPXX:VPEKM:KPLS,
SIPKAXX:VPTEL:KPLS, HVTKPTX:APTKL:KPLS,
YVPKPXX:APTKL:KPLS, TVPKPXX:APTQL:KPLS,
AVPKAXX:APTKL:KPLS, KVGKAXX:VPTKL:KPLS,
KASKAXX:VPTKL:KPLS, GSAGPXX:TPTKM:KPLS,
AAPASXX:VPARL:KPLS, STPPTXX:VPTRL:KPLS,
HVPKPXX:APTKL:KPLS, ASAAPXX:VPQAL:KPLS,
ASASPXX:VSQDL:KPLS, ASASPXX:VPQDL:KPLS,
NDEGLEX:VPTEE:KPLS, NDEGLEX:VPTGQ:KPLS,
SSVKXQP:SRVHH:KPLS, RNVQXRP:TQVQL:KPLS,
KIPKAXX:VPQEL:EPLP, GIPEPXX:VPQKM:EPLP,
SIPKAXX:VPQEL:EPLP, HVTKPTX:VPQKL:EPLP,
YVPKPXX:VPQKL:EPLP, TVPKPXX:VPQQL:EPLP,
AVPKAXX:VPQKL:EPLP, KVGKAXX:VPQKL:EPLP,
KASKAXX:VPQKL:EPLP, GSAGPXX:VPQKM:EPLP,
AAPASXX:VPQRL:EPLP, STPPTXX:VPQRL:EPLP,
HVPKPXX:VPQKL:EPLP, RVPSTXX:VPQKT:EPLP,
ASASPXX:VPQDL:EPLP, KIPKAXX:VPTEL:EPLP,
GIPEPXX:VPEKM:EPLP, SIPKAXX:VPTEL:EPLP,
HVTKPTX:APTKL:EPLP, YVPKPXX:APTKL:EPLP,
TVPKPXX:APTQL:EPLP, AVPKAXX:APTKL:EPLP,
KVGKAXX:VPTKL:EPLP, KASKAXX:VPTKL:EPLP,
GSAGPXX:TPTKM:EPLP, AAPASXX:VPARL:EPLP,
STPPTXX:VPTRL:EPLP, HVPKPXX:APTKL:EPLP,
RVPSTXX:APVKT:EPLP, ASASPXX:VSQDL:EPLP,
NDEGLEX:VPTEE:EPLP, NDEGLEX:VPTGQ:EPLP,
SSVKXQP:SRVHH:EPLP, RNVQXRP:TQVQL:EPLP,
KIPKAXX:VSQEL:EPLT, GIPEPXX:VSQKM:EPLT,
SIPKAXX:VSQEL:EPLT, HVTKPTX:VSQKL:EPLT,
YVPKPXX:VSQKL:EPLT, TVPKPXX:VSQQL:EPLT,
AVPKAXX:VSQKL:EPLT, KVGKAXX:VSQKL:EPLT,
KASKAXX:VSQKL:EPLT, GSAGPXX:VSQKM:EPLT,
AAPASXX:VSQRL:EPLT, STPPTXX:VSQRL:EPLT,
HVPKPXX:VSQKL:EPLT, RVPSTXX:VSQKT:EPLT,
ASAAPXX:VSQAL:EPLT, ASASPXX:VSQDL:EPLT,
KIPKAXX:VPTEL:EPLT, GIPEPXX:VPEKM:EPLT,
SIPKAXX:VPTEL:EPLT, HVTKPTX:APTKL:EPLT,
YVPKPXX:APTKL:EPLT, TVPKPXX:APTQL:EPLT,
AVPKAXX:APTKL:EPLT, KVGKAXX:VPTKL:EPLT,
KASKAXX:VPTKL:EPLT, GSAGPXX:TPTKM:EPLT,
AAPASXX:VPARL:EPLT, STPPTXX:VPTRL:EPLT,
HVPKPXX:APTKL:EPLT, RVPSTXX:APVKT:EPLT,
ASAAPXX:VPQAL:EPLT, NDEGLEX:VPTEE:EPLT,
NDEGLEX:VPTGQ:EPLT, SSVKXQP:SRVHH:EPLT,
RNVQXRP:TQVQL:EPLT, KIPKAXX:VPQEL:EPLT,
GIPEPXX:VPQKM:EPLT, SIPKAXX:VPQEL:EPLT,
HVTKPTX:VPQKL:EPLT, YVPKPXX:VPQKL:EPLT,
TVPKPXX:VPQQL:EPLT, AVPKAXX:VPQKL:EPLT,
KVGKAXX:VPQKL:EPLT, KASKAXX:VPQKL:EPLT,
GSAGPXX:VPQKM:EPLT, AAPASXX:VPQRL:EPLT,
STPPTXX:VPQRL:EPLT, HVPKPXX:VPQKL:EPLT,
RVPSTXX:VPQKT:EPLT, ASASPXX:VPQDL:EPLT,
NDEGLEX:VPTGQ:SNIT, GIPEPXX:VPEKM:SNIT,
HVTKPTX:APTKL:SNIT, YVPKPXX:APTKL:SNIT,
TVPKPXX:APTQL:SNIT, AVPKAXX:APTKL:SNIT,
GSAGPXX:TPTKM:SNIT, AAPASXX:VPARL:SNIT,
HVPKPXX:APTKL:SNIT, RVPSTXX:APVKT:SNIT,
ASAAPXX:VPQAL:SNIT, ASASPXX:VSQDL:SNIT,
ASASPXX:VPQDL:SNIT, SSVKXQP:SRVHH:SNIT,
RNVQXRP:TQVQL:SNIT, RNVQXRP:SRVQL:RSVK,
KIPKAXX:VPTEL:RSVK, GIPEPXX:VPEKM:RSVK,
SIPKAXX:VPTEL:RSVK, HVTKPTX:APTKL:RSVK,
YVPKPXX:APTKL:RSVK, TVPKPXX:APTQL:RSVK,
AVPKAXX:APTKL:RSVK, KVGKAXX:VPTKL:RSVK,
KASKAXX:VPTKL:RSVK, GSAGPXX:TPTKM:RSVK,
AAPASXX:VPARL:RSVK, STPPTXX:VPTRL:RSVK,
HVPKPXX:APTKL:RSVK, RVPSTXX:APVKT:RSVK,
ASAAPXX:VPQAL:RSVK, ASASPXX:VSQDL:RSVK,
ASASPXX:VPQDL:RSVK, NDEGLEX:VPTEE:RSVK,
NDEGLEX:VPTGQ:RSVK, RNVQXRP:TQVQL:RSVK,
SSVKXQP:TQVHH:RPVQ, KIPKAXX:VPTEL:RPVQ,
GIPEPXX:VPEKM:RPVQ, SIPKAXX:VPTEL:RPVQ,
HVTKPTX:APTKL:RPVQ, YVPKPXX:APTKL:RPVQ,
TVPKPXX:APTQL:RPVQ, AVPKAXX:APTKL:RPVQ,
KVGKAXX:VPTKL:RPVQ, KASKAXX:VPTKL:RPVQ,
GSAGPXX:TPTKM:RPVQ, AAPASXX:VPARL:RPVQ,
STPPTXX:VPTRL:RPVQ, HVPKPXX:APTKL:RPVQ,
RVPSTXX:APVKT:RPVQ, ASAAPXX:VPQAL:RPVQ,
ASASPXX:VSQDL:RPVQ, ASASPXX:VPQDL:RPVQ,
NDEGLEX:VPTEE:RPVQ, NDEGLEX:VPTGQ:RPVQ
and
SSVKXQP:SRVHH:RPVQ.

[0327] In certain embodiments, the triplet PEP7:PEP5:PEP12 is selected from the group consisting of GIPEPXX:VPTKM:SAIS-AA¹⁷-LYL, HVTKPTX:VPTKL:SAIS-AA¹⁷-LYL, YVPKPXX:VPTKL:SAIS-AA¹⁷-LYL, TVPKPXX:VPTQL:SAIS-AA¹⁷-LYL, AVPKAXX:VPTKL:SAIS-AA¹⁷-LYL, KVGKAXX:VPTKL:SAIS-AA¹⁷-LYL, KASKAXX:VPTKL:SAIS-AA¹⁷-LYL, GSAGPXX:VPTKM:SAIS-AA¹⁷-LYL, AAPASXX:VPTRL:SAIS-AA¹⁷-LYL, STPPTXX:VPTRL:SAIS-AA¹⁷-LYL, HVPKPXX:VPTKL:SAIS-AA¹⁷-LYL, RVPSTXX:VPTKT:SAIS-AA¹⁷-LYL, ASAAPXX:VPTAL:SAIS-AA¹⁷-LYL, ASASPXX:VPTDL:SAIS-AA¹⁷-LYL, GIPEPXX:VPEKM:SAIS-AA¹⁷-LYL, HVTKPTX:APTKL:SAIS-AA¹⁷-LYL, YVPKPXX:APTKL:SAIS-AA¹⁷-LYL, TVPKPXX:APTQL:SAIS-AA¹⁷-LYL, AVPKAXX:APTKL:SAIS-AA¹⁷-LYL, GSAGPXX:TPTKM:SAIS-AA¹⁷-LYL, AAPASXX:VPARL:SAIS-AA¹⁷-LYL, HVPKPXX:APTKL:SAIS-AA¹⁷-LYL, RVPSTXX:APVKT:SAIS-AA¹⁷-LYL, ASAAPXX:VPQAL:SAIS-AA¹⁷-LYL, ASASPXX:VSQDL:SAIS-AA¹⁷-LYL, ASASPXX:VPQDL:SAIS-AA¹⁷-LYL, SSVKXQP:SRVHH:SAIS-AA¹⁷-LYL, RNVQXRP:TQVQL:SAIS-AA¹⁷-LYL, KIPKAXX:VPEEL:SSLS-AA¹⁷-LFF, SIPKAXX:VPEEL:SSLS-AA¹⁷-LFF, HVTKPTX:VPEKL:SSLS-AA¹⁷-LFF, YVPKPXX:VPEKL:SSLS-AA¹⁷-LFF, TVPKPXX:VPEQL:SSLS-AA¹⁷-LFF, AVPKAXX:VPEKL:SSLS-AA¹⁷-LFF, KVGKAXX:VPEKL:SSLS-AA¹⁷-LFF, KASKAXX:VPEKL:SSLS-AA¹⁷-LFF, GSAGPXX:VPEKM:SSLS-AA¹⁷-LFF, AAPASXX:VPERL:SSLS-AA¹⁷-LFF, STPPTXX:VPERL:SSLS-AA¹⁷-LFF, HVPKPXX:VPEKL:SSLS-AA¹⁷-LFF, RVPSTXX:VPEKT:SSLS-AA¹⁷-LFF, ASAAPXX:VPEAL:SSLS-AA¹⁷-LFF, ASASPXX:VPEDL:SSLS-AA¹⁷-LFF, KIPKAXX:VPTEL:SSLS-AA¹⁷-LFF, SIPKAXX:VPTEL:SSLS-AA¹⁷-LFF, HVTKPTX:APTKL:SSLS-AA¹⁷-LFF, YVPKPXX:APTKL:SSLS-AA¹⁷-LFF, TVPKPXX:APTQL:SSLS-AA¹⁷-LFF, AVPKAXX:APTKL:SSLS-AA¹⁷-LFF, KVGKAXX:VPTKL:SSLS-AA¹⁷-LFF, KASKAXX:VPTKL:SSLS-AA¹⁷-LFF, GSAGPXX:TPTKM:SSLS-AA¹⁷-LFF, AAPASXX:VPARL:SSLS-AA¹⁷-LFF, STPPTXX:VPTRL:SSLS-AA¹⁷-LFF, HVPKPXX:APTKL:SSLS-AA¹⁷-LFF, RVPSTXX:APVKT:SSLS-AA¹⁷-LFF, ASAAPXX:VPQAL:SSLS-AA¹⁷-LFF, ASASPXX:VSQDL:SSLS-AA¹⁷-LFF, ASASPXX:VPQDL:SSLS-AA¹⁷-LFF, NDEGLEX:VPTEE:SSLS-AA¹⁷-LFF, NDEGLEX:VPTGQ:SSLS-AA¹⁷-LFF, SSVKXQP:SRVHH:SSLS-AA¹⁷-LFF, RNVQXRP:TQVQL:SSLS-AA¹⁷-LFF, KIPKAXX:APTEL:NAIS-AA¹⁷-LYF, GIPEPXX:APTKM:NAIS-AA¹⁷-LYF, SIPKAXX:APTEL:NAIS-AA¹⁷-LYF, AVPKAXX:APTKL:NAIS-AA¹⁷-LYF, KVGKAXX:APTKL:NAIS-AA¹⁷-LYF, KASKAXX:APTKL:NAIS-AA¹⁷-LYF, GSAGPXX:APTKM:NAIS-AA¹⁷-LYF, AAPASXX:APTRL:NAIS-AA¹⁷-LYF, STPPTXX:APTRL:NAIS-AA¹⁷-LYF, RVPSTXX:APTKT:NAIS-AA¹⁷-LYF, ASAAPXX:APTAL:NAIS-AA¹⁷-LYF, ASASPXX:APTDL:NAIS-AA¹⁷-LYF, KIPKAXX:VPTEL:NAIS-AA¹⁷-LYF, GIPEPXX:VPEKM:NAIS-AA¹⁷-LYF, SIPKAXX:VPTEL:NAIS-AA¹⁷-LYF, KVGKAXX:VPTKL:NAIS-AA¹⁷-LYF, KASKAXX:VPTKL:NAIS-AA¹⁷-LYF, GSAGPXX:TPTKM:NAIS-AA¹⁷-LYF, AAPASXX:VPARL:NAIS-AA¹⁷-LYF, STPPTXX:VPTRL:NAIS-AA¹⁷-LYF, RVPSTXX:APVKT:NAIS-AA¹⁷-LYF, ASAAPXX:VPQAL:NAIS-AA¹⁷-LYF, ASASPXX:VSQDL:NAIS-AA¹⁷-LYF, ASASPXX:VPQDL:NAIS-AA¹⁷-LYF, NDEGLEX:VPTEE:NAIS-AA¹⁷-LYF, NDEGLEX:VPTGQ:NAIS-AA¹⁷-LYF, SSVKXQP:SRVHH:NAIS-AA¹⁷-LYF, RNVQXRP:TQVQL:NAIS-AA¹⁷-LYF, KIPKAXX:APTEL:SATS-AA¹⁷-LYY, GIPEPXX:APTKM:SATS-AA¹⁷-LYY, SIPKAXX:APTEL:SATS-AA¹⁷-LYY, HVTKPTX:APTKL:SATS-AA¹⁷-LYY, YVPKPXX:APTKL:SATS-AA¹⁷-LYY, TVPKPXX:APTQL:SATS-AA¹⁷-LYY, KVGKAXX:APTKL:SATS-AA¹⁷-LYY, KASKAXX:APTKL:SATS-AA¹⁷-LYY, GSAGPXX:APTKM:SATS-AA¹⁷-LYY, AAPASXX:APTRL:SATS-AA¹⁷-LYY, STPPTXX:APTRL:SATS-AA¹⁷-LYY, HVPKPXX:APTKL:SATS-AA¹⁷-LYY, RVPSTXX:APTKT:SATS-AA¹⁷-LYY, ASAAPXX:APTAL:SATS-AA¹⁷-LYY, ASASPXX:APTDL:SATS-AA¹⁷-LYY, KIPKAXX:VPTEL:SATS-AA¹⁷-LYY, GIPEPXX:VPEKM:SATS-AA¹⁷-LYY, SIPKAXX:VPTEL:SATS-AA¹⁷-LYY, KVGKAXX:VPTKL:SATS-AA¹⁷-LYY, KASKAXX:VPTKL:SATS-AA¹⁷-LYY, GSAGPXX:TPTKM:SATS-AA¹⁷-LYY, AAPASXX:VPARL:SATS-AA¹⁷-LYY, STPPTXX:VPTRL:SATS-AA¹⁷-LYY, RVPSTXX:APVKT:SATS-AA¹⁷-LYY, ASAAPXX:VPQAL:SATS-AA¹⁷-LYY, ASASPXX:VSQDL:SATS-AA¹⁷-LYY, ASASPXX:VPQDL:SATS-AA¹⁷-LYY, NDEGLEX:VPTEE:SATS-AA¹⁷-LYY, NDEGLEX:VPTGQ:SATS-AA¹⁷-LYY, SSVKXQP:SRVHH:SATS-AA¹⁷-LYY, RNVQXRP:TQVQL:SATS-AA¹⁷-LYY, KIPKAXX:VPTEL:SPIS-AA¹⁷-LYK, GIPEPXX:VPTKM:SPIS-AA¹⁷-LYK, SIPKAXX:VPTEL:SPIS-AA¹⁷-LYK, HVTKPTX:VPTKL:SPIS-AA¹⁷-LYK, YVPKPXX:VPTKL:SPIS-AA¹⁷-LYK, TVPKPXX:VPTQL:SPIS-AA¹⁷-LYK, AVPKAXX:VPTKL:SPIS-AA¹⁷-LYK, KASKAXX:VPTKL:SPIS-AA¹⁷-LYK, GSAGPXX:VPTKM:SPIS-AA¹⁷-LYK, AAPASXX:VPTRL:SPIS-AA¹⁷-LYK, STPPTXX:VPTRL:SPIS-AA¹⁷-LYK, HVPKPXX:VPTKL:SPIS-AA¹⁷-LYK, RVPSTXX:VPTKT:SPIS-AA¹⁷-LYK, ASAAPXX:VPTAL:SPIS-AA¹⁷-LYK, ASASPXX:VPTDL:SPIS-AA¹⁷-LYK, GIPEPXX:VPEKM:SPIS-AA¹⁷-LYK, HVTKPTX:APTKL:SPIS-AA¹⁷-LYK, YVPKPXX:APTKL:SPIS-AA¹⁷-LYK, TVPKPXX:APTQL:SPIS-AA¹⁷-LYK, AVPKAXX:APTKL:SPIS-AA¹⁷-LYK, GSAGPXX:TPTKM:SPIS-AA¹⁷-LYK, AAPASXX:VPARL:SPIS-AA¹⁷-LYK, HVPKPXX:APTKL:SPIS-AA¹⁷-LYK, RVPSTXX:APVKT:SPIS-AA¹⁷-LYK, ASAAPXX:VPQAL:SPIS-AA¹⁷-LYK, ASASPXX:VSQDL:SPIS-AA¹⁷-LYK, ASASPXX:VPQDL:SPIS-AA¹⁷-LYK, SSVKXQP:SRVHH:SPIS-AA¹⁷-LYK, RNVQXRP:TQVQL:SPIS-AA¹⁷-LYK, KIPKAXX:VPTEL:EPIS-AA¹⁷-LYL, GIPEPXX:VPTKM:EPIS-AA¹⁷-LYL, SIPKAXX:VPTEL:EPIS-AA¹⁷-LYL, HVTKPTX:VPTKL:EPIS-AA¹⁷-LYL, YVPKPXX:VPTKL:EPIS-AA¹⁷-LYL, TVPKPXX:VPTQL:EPIS-AA¹⁷-LYL, AVPKAXX:VPTKL:EPIS-AA¹⁷-LYL, KVGKAXX:VPTKL:EPIS-AA¹⁷-LYL, GSAGPXX:VPTKM:EPIS-AA¹⁷-LYL, AAPASXX:VPTRL:EPIS-AA¹⁷-LYL, STPPTXX:VPTRL:EPIS-AA¹⁷-LYL, HVPKPXX:VPTKL:EPIS-AA¹⁷-LYL, RVPSTXX:VPTKT:EPIS-AA¹⁷-LYL, ASAAPXX:VPTAL:EPIS-AA¹⁷-LYL, ASASPXX:VPTDL:EPIS-AA¹⁷-LYL, GIPEPXX:VPEKM:EPIS-AA¹⁷-LYL, HVTKPTX:APTKL:EPIS-AA¹⁷-LYL, YVPKPXX:APTKL:EPIS-AA¹⁷-LYL, TVPKPXX:APTQL:EPIS-AA¹⁷-LYL, AVPKAXX:APTKL:EPIS-AA¹⁷-LYL, GSAGPXX:TPTKM:EPIS-AA¹⁷-LYL, AAPASXX:VPARL:EPIS-AA¹⁷-LYL, HVPKPXX:APTKL:EPIS-AA¹⁷-LYL, RVPSTXX:APVKT:EPIS-AA¹⁷-LYL, ASAAPXX:VPQAL:EPIS-AA¹⁷-LYL, ASASPXX:VSQDL:EPIS-AA¹⁷-LYL, ASASPXX:VPQDL:EPIS-AA¹⁷-LYL, SSVKXQP:SRVHH:EPIS-AA¹⁷-LYL, RNVQXRP:TQVQL:EPIS-AA¹⁷-LYL, KIPKAXX:TPTEL:SPIN-AA¹⁷-LYF, GIPEPXX:TPTKM:SPIN-AA¹⁷-LYF, SIPKAXX:TPTEL:SPIN-AA¹⁷-LYF, HVTKPTX:TPTKL:SPIN-AA¹⁷-LYF, YVPKPXX:TPTKL:SPIN-AA¹⁷-LYF, TVPKPXX:TPTQL:SPIN-AA¹⁷-LYF, AVPKAXX:TPTKL:SPIN-AA¹⁷-LYF, KVGKAXX:TPTKL:SPIN-AA¹⁷-LYF, KASKAXX:TPTKL:SPIN-AA¹⁷-LYF, AAPASXX:TPTRL:SPIN-AA¹⁷-LYF, STPPTXX:TPTRL:SPIN-AA¹⁷-LYF, HVPKPXX:TPTKL:SPIN-AA¹⁷-LYF, RVPSTXX:TPTKT:SPIN-AA¹⁷-LYF, ASAAPXX:TPTAL:SPIN-AA¹⁷-LYF, ASASPXX:TPTDL:SPIN-AA¹⁷-LYF, KIPKAXX:VPTEL:SPIN-AA¹⁷-LYF, GIPEPXX:VPEKM:SPIN-AA¹⁷-LYF, SIPKAXX:VPTEL:SPIN-AA¹⁷-LYF, HVTKPTX:APTKL:SPIN-AA¹⁷-LYF, YVPKPXX:APTKL:SPIN-AA¹⁷-LYF, TVPKPXX:APTQL:SPIN-AA¹⁷-LYF, AVPKAXX:APTKL:SPIN-AA¹⁷-LYF, KVGKAXX:VPTKL:SPIN-AA¹⁷-LYF, KASKAXX:VPTKL:SPIN-AA¹⁷-LYF, AAPASXX:VPARL:SPIN-AA¹⁷-LYF, STPPTXX:VPTRL:SPIN-AA¹⁷-LYF, HVPKPXX:APTKL:SPIN-AA¹⁷-LYF, RVPSTXX:APVKT:SPIN-AA¹⁷-LYF, ASAAPXX:VPQAL:SPIN-AA¹⁷-LYF, ASASPXX:VSQDL:SPIN-AA¹⁷-LYF, ASASPXX:VPQDL:SPIN-AA¹⁷-LYF, NDEGLEX:VPTEE:SPIN-AA¹⁷-LYF, NDEGLEX:VPTGQ:SPIN-AA¹⁷-LYF, SSVKXQP:SRVHH:SPIN-AA¹⁷-LYF, RNVQXRP:TQVQL:SPIN-AA¹⁷-LYF, KIPKAXX:VPAEL:SPIS-AA¹⁷-LYI, GIPEPXX:VPAKM:SPIS-AA¹⁷-LYI, SIPKAXX:VPAEL:SPIS-AA¹⁷-LYI, HVTKPTX:VPAKL:SPIS-AA¹⁷-LYI, YVPKPXX:VPAKL:SPIS-AA¹⁷-LYI, TVPKPXX:VPAQL:SPIS-AA¹⁷-LYI, AVPKAXX:VPAKL:SPIS-AA¹⁷-LYI, KVGKAXX:VPAKL:SPIS-AA¹⁷-LYI, KASKAXX:VPAKL:SPIS-AA¹⁷-LYI, GSAGPXX:VPAKM:SPIS-AA¹⁷-LYI, STPPTXX:VPARL:SPIS-AA¹⁷-LYI, HVPKPXX:VPAKL:SPIS-AA¹⁷-LYI, RVPSTXX:VPAKT:SPIS-AA¹⁷-LYI, ASAAPXX:VPAAL:SPIS-AA¹⁷-LYI, ASASPXX:VPADL:SPIS-AA¹⁷-LYI, KIPKAXX:VPTEL:SPIS-AA¹⁷-LYI, GIPEPXX:VPEKM:SPIS-AA¹⁷-LYI, SIPKAXX:VPTEL:SPIS-AA¹⁷-LYI, HVTKPTX:APTKL:SPIS-AA¹⁷-LYI, YVPKPXX:APTKL:SPIS-AA¹⁷-LYI, TVPKPXX:APTQL:SPIS-AA¹⁷-LYI, AVPKAXX:APTKL:SPIS-AA¹⁷-LYI, KVGKAXX:VPTKL:SPIS-AA¹⁷-LYI, KASKAXX:VPTKL:SPIS-AA¹⁷-LYI, GSAGPXX:TPTKM:SPIS-AA¹⁷-LYI, STPPTXX:VPTRL:SPIS-AA¹⁷-LYI, HVPKPXX:APTKL:SPIS-AA¹⁷-LYI, RVPSTXX:APVKT:SPIS-AA¹⁷-LYI, ASAAPXX:VPQAL:SPIS-AA¹⁷-LYI, ASASPXX:VSQDL:SPIS-AA¹⁷-LYI, ASASPXX:VPQDL:SPIS-AA¹⁷-LYI, NDEGLEX:VPTEE:SPIS-AA¹⁷-LYI, NDEGLEX:VPTGQ:SPIS-AA¹⁷-LYI, SSVKXQP:SRVHH:SPIS-AA¹⁷-LYI, RNVQXRP:TQVQL:SPIS-AA¹⁷-LYI, KIPKAXX:VPTEL:SPIS-AA¹⁷-LFI, GIPEPXX:VPTKM:SPIS-AA¹⁷-LFI, SIPKAXX:VPTEL:SPIS-AA¹⁷-LFI, HVTKPTX:VPTKL:SPIS-AA¹⁷-LFI, YVPKPXX:VPTKL:SPIS-AA¹⁷-LFI, TVPKPXX:VPTQL:SPIS-AA¹⁷-LFI, AVPKAXX:VPTKL:SPIS-AA¹⁷-LFI, KVGKAXX:VPTKL:SPIS-AA¹⁷-LFI, KASKAXX:VPTKL:SPIS-AA¹⁷-LFI, GSAGPXX:VPTKM:SPIS-AA¹⁷-LFI, AAPASXX:VPTRL:SPIS-AA¹⁷-LFI, HVPKPXX:VPTKL:SPIS-AA¹⁷-LFI, RVPSTXX:VPTKT:SPIS-AA¹⁷-LFI, ASAAPXX:VPTAL:SPIS-AA¹⁷-LFI, ASASPXX:VPTDL:SPIS-AA¹⁷-LFI, GIPEPXX:VPEKM:SPIS-AA¹⁷-LFI, HVTKPTX:APTKL:SPIS-AA¹⁷-LFI, YVPKPXX:APTKL:SPIS-AA¹⁷-LFI, TVPKPXX:APTQL:SPIS-AA¹⁷-LFI, AVPKAXX:APTKL:SPIS-AA¹⁷-LFI, GSAGPXX:TPTKM:SPIS-AA¹⁷-LFI, AAPASXX:VPARL:SPIS-AA¹⁷-LFI, HVPKPXX:APTKL:SPIS-AA¹⁷-LFI, RVPSTXX:APVKT:SPIS-AA¹⁷-LFI, ASAAPXX:VPQAL:SPIS-AA¹⁷-LFI, ASASPXX:VSQDL:SPIS-AA¹⁷-LFI, ASASPXX:VPQDL:SPIS-AA¹⁷-LFI, SSVKXQP:SRVHH:SPIS-AA¹⁷-LFI, RNVQXRP:TQVQL:SPIS-AA¹⁷-LFI, KIPKAXX:APVEL:KPLS-AA¹⁷-LYV, GIPEPXX:APVKM:KPLS-AA¹⁷-LYV, SIPKAXX:APVEL:KPLS-AA¹⁷-LYV, HVTKPTX:APVKL:KPLS-AA¹⁷-LYV, YVPKPXX:APVKL:KPLS-AA¹⁷-LYV, TVPKPXX:APVQL:KPLS-AA¹⁷-LYV, AVPKAXX:APVKL:KPLS-AA¹⁷-LYV, KVGKAXX:APVKL:KPLS-AA¹⁷-LYV, KASKAXX:APVKL:KPLS-AA¹⁷-LYV, GSAGPXX:APVKM:KPLS-AA¹⁷-LYV, AAPASXX:APVRL:KPLS-AA¹⁷-LYV, STPPTXX:APVRL:KPLS-AA¹⁷-LYV, HVPKPXX:APVKL:KPLS-AA¹⁷-LYV, ASAAPXX:APVAL:KPLS-AA¹⁷-LYV, ASASPXX:APVDL:KPLS-AA¹⁷-LYV, KIPKAXX:VPTEL:KPLS-AA¹⁷-LYV, GIPEPXX:VPEKM:KPLS-AA¹⁷-LYV, SIPKAXX:VPTEL:KPLS-AA¹⁷-LYV, HVTKPTX:APTKL:KPLS-AA¹⁷-LYV, YVPKPXX:APTKL:KPLS-AA¹⁷-LYV, TVPKPXX:APTQL:KPLS-AA¹⁷-LYV, AVPKAXX:APTKL:KPLS-AA¹⁷-LYV, KVGKAXX:VPTKL:KPLS-AA¹⁷-LYV, KASKAXX:VPTKL:KPLS-AA¹⁷-LYV, GSAGPXX:TPTKM:KPLS-AA¹⁷-LYV, AAPASXX:VPARL:KPLS-AA¹⁷-LYV, STPPTXX:VPTRL:KPLS-AA¹⁷-LYV, HVPKPXX:APTKL:KPLS-AA¹⁷-LYV, ASAAPXX:VPQAL:KPLS-AA¹⁷-LYV, ASASPXX:VSQDL:KPLS-AA¹⁷-LYV, ASASPXX:VPQDL:KPLS-AA¹⁷-LYV, NDEGLEX:VPTEE:KPLS-AA¹⁷-LYV, NDEGLEX:VPTGQ:KPLS-AA¹⁷-LYV, SSVKXQP:SRVHH:KPLS-AA¹⁷-LYV, RNVQXRP:TQVQL:KPLS-AA¹⁷-LYV, KIPKAXX:VPQEL:EPLP-AA¹⁷-VYY, GIPEPXX:VPQKM:EPLP-AA¹⁷-VYY, SIPKAXX:VPQEL:EPLP-AA¹⁷-VYY, HVTKPTX:VPQKL:EPLP-AA¹⁷-VYY, YVPKPXX:VPQKL:EPLP-AA¹⁷-VYY, TVPKPXX:VPQQL:EPLP-AA¹⁷-VYY, AVPKAXX:VPQKL:EPLP-AA¹⁷-VYY, KVGKAXX:VPQKL:EPLP-AA¹⁷-VYY, KASKAXX:VPQKL:EPLP-AA¹⁷-VYY, GSAGPXX:VPQKM:EPLP-AA¹⁷-VYY, AAPASXX:VPQRL:EPLP-AA¹⁷-VYY, STPPTXX:VPQRL:EPLP-AA¹⁷-VYY, HVPKPXX:VPQKL:EPLP-AA¹⁷-VYY, RVPSTXX:VPQKT:EPLP-AA¹⁷-VYY, ASASPXX:VPQDL:EPLP-AA¹⁷-VYY, KIPKAXX:VPTEL:EPLP-AA¹⁷-VYY, GIPEPXX:VPEKM:EPLP-AA¹⁷-VYY, SIPKAXX:VPTEL:EPLP-AA¹⁷-VYY, HVTKPTX:APTKL:EPLP-AA¹⁷-VYY, YVPKPXX:APTKL:EPLP-AA¹⁷-VYY, TVPKPXX:APTQL:EPLP-AA¹⁷-VYY, AVPKAXX:APTKL:EPLP-AA¹⁷-VYY, KVGKAXX:VPTKL:EPLP-AA¹⁷-VYY, KASKAXX:VPTKL:EPLP-AA¹⁷-VYY, GSAGPXX:TPTKM:EPLP-AA¹⁷-VYY, AAPASXX:VPARL:EPLP-AA¹⁷-VYY, STPPTXX:VPTRL:EPLP-AA¹⁷-VYY, HVPKPXX:APTKL:EPLP-AA¹⁷-VYY, RVPSTXX:APVKT:EPLP-AA¹⁷-VYY, ASASPXX:VSQDL:EPLP-AA¹⁷-VYY, NDEGLEX:VPTEE:EPLP-AA¹⁷-VYY, NDEGLEX:VPTGQ:EPLP-AA¹⁷-VYY, SSVKXQP:SRVHH:EPLP-AA¹⁷-VYY, RNVQXRP:TQVQL:EPLP-AA¹⁷-VYY, KIPKAXX:VSQEL:EPLT-AA¹⁷-LYY, GIPEPXX:VSQKM:EPLT-AA¹⁷-LYY, SIPKAXX:VSQEL:EPLT-AA¹⁷-LYY, HVTKPTX:VSQKL:EPLT-AA¹⁷-LYY, YVPKPXX:VSQKL:EPLT-AA¹⁷-LYY, TVPKPXX:VSQQL:EPLT-AA¹⁷-LYY, AVPKAXX:VSQKL:EPLT-AA¹⁷-LYY, KVGKAXX:VSQKL:EPLT-AA¹⁷-LYY, KASKAXX:VSQKL:EPLT-AA¹⁷-LYY, GSAGPXX:VSQKM:EPLT-AA¹⁷-LYY, AAPASXX:VSQRL:EPLT-AA¹⁷-LYY, STPPTXX:VSQRL:EPLT-AA¹⁷-LYY, HVPKPXX:VSQKL:EPLT-AA¹⁷-LYY, RVPSTXX:VSQKT:EPLT-AA¹⁷-LYY, ASAAPXX:VSQAL:EPLT-AA¹⁷-LYY, ASASPXX:VSQDL:EPLT-AA¹⁷-LYY, KIPKAXX:VPTEL:EPLT-AA¹⁷-LYY, GIPEPXX:VPEKM:EPLT-AA¹⁷-LYY, SIPKAXX:VPTEL:EPLT-AA¹⁷-LYY, HVTKPTX:APTKL:EPLT-AA¹⁷-LYY, YVPKPXX:APTKL:EPLT-AA¹⁷-LYY, TVPKPXX:APTQL:EPLT-AA¹⁷-LYY, AVPKAXX:APTKL:EPLT-AA¹⁷-LYY, KVGKAXX:VPTKL:EPLT-AA¹⁷-LYY, KASKAXX:VPTKL:EPLT-AA¹⁷-LYY, GSAGPXX:TPTKM:EPLT-AA¹⁷-LYY, AAPASXX:VPARL:EPLT-AA¹⁷-LYY, STPPTXX:VPTRL:EPLT-AA¹⁷-LYY, HVPKPXX:APTKL:EPLT-AA¹⁷-LYY, RVPSTXX:APVKT:EPLT-AA¹⁷-LYY, ASAAPXX:VPQAL:EPLT-AA¹⁷-LYY, NDEGLEX:VPTEE:EPLT-AA¹⁷-LYY, NDEGLEX:VPTGQ:EPLT-AA¹⁷-LYY, SSVKXQP:SRVHH:EPLT-AA¹⁷-LYY, RNVQXRP:TQVQL:EPLT-AA¹⁷-LYY, KIPKAXX:VPQEL:EPLT-AA¹⁷-LYY, GIPEPXX:VPQKM:EPLT-AA¹⁷-LYY, SIPKAXX:VPQEL:EPLT-AA¹⁷-LYY, HVTKPTX:VPQKL:EPLT-AA¹⁷-LYY, YVPKPXX:VPQKL:EPLT-AA¹⁷-LYY, TVPKPXX:VPQQL:EPLT-AA¹⁷-LYY, AVPKAXX:VPQKL:EPLT-AA¹⁷-LYY, KVGKAXX:VPQKL:EPLT-AA¹⁷-LYY, KASKAXX:VPQKL:EPLT-AA¹⁷-LYY, GSAGPXX:VPQKM:EPLT-AA¹⁷-LYY, AAPASXX:VPQRL:EPLT-AA¹⁷-LYY, STPPTXX:VPQRL:EPLT-AA¹⁷-LYY, HVPKPXX:VPQKL:EPLT-AA¹⁷-LYY, RVPSTXX:VPQKT:EPLT-AA¹⁷-LYY, ASASPXX:VPQDL:EPLT-AA¹⁷-LYY, NDEGLEX:VPTGQ:SNIT-AA¹⁷-QIM, GIPEPXX:VPEKM:SNIT-AA¹⁷-QIM, HVTKPTX:APTKL:SNIT-AA¹⁷-QIM, YVPKPXX:APTKL:SNIT-AA¹⁷-QIM, TVPKPXX:APTQL:SNIT-AA¹⁷-QIM, AVPKAXX:APTKL:SNIT-AA¹⁷-QIM, GSAGPXX:TPTKM:SNIT-AA¹⁷-QIM, AAPASXX:VPARL:SNIT-AA¹⁷-QIM, HVPKPXX:APTKL:SNIT-AA¹⁷-QIM, RVPSTXX:APVKT:SNIT-AA¹⁷-QIM, ASAAPXX:VPQAL:SNIT-AA¹⁷-QIM, ASASPXX:VSQDL:SNIT-AA¹⁷-QIM, ASASPXX:VPQDL:SNIT-AA¹⁷-QIM, SSVKXQP:SRVHH:SNIT-AA¹⁷-QIM, RNVQXRP:TQVQL:SNIT-AA¹⁷-QIM, RNVQXRP:SRVQL:RSVK-AA¹⁷-AKV, KIPKAXX:VPTEL:RSVK-AA¹⁷-AKV, GIPEPXX:VPEKM:RSVK-AA¹⁷-AKV, SIPKAXX:VPTEL:RSVK-AA¹⁷-AKV, HVTKPTX:APTKL:RSVK-AA¹⁷-AKV, YVPKPXX:APTKL:RSVK-AA¹⁷-AKV, TVPKPXX:APTQL:RSVK-AA¹⁷-AKV, AVPKAXX:APTKL:RSVK-AA¹⁷-AKV, KVGKAXX:VPTKL:RSVK-AA¹⁷-AKV, KASKAXX:VPTKL:RSVK-AA¹⁷-AKV, GSAGPXX:TPTKM:RSVK-AA¹⁷-AKV, AAPASXX:VPARL:RSVK-AA¹⁷-AKV, STPPTXX:VPTRL:RSVK-AA¹⁷-AKV, HVPKPXX:APTKL:RSVK-AA¹⁷-AKV, RVPSTXX:APVKT:RSVK-AA¹⁷-AKV, ASAAPXX:VPQAL:RSVK-AA¹⁷-AKV, ASASPXX:VSQDL:RSVK-AA¹⁷-AKV, ASASPXX:VPQDL:RSVK-AA¹⁷-AKV, NDEGLEX:VPTEE:RSVK-AA¹⁷-AKV, NDEGLEX:VPTGQ:RSVK-AA¹⁷-AKV, RNVQXRP:TQVQL:RSVK-AA¹⁷-AKV, SSVKXQP:TQVHH:RPVQ-AA¹⁷-RKI, KIPKAXX:VPTEL:RPVQ-AA¹⁷-RKI, GIPEPXX:VPEKM:RPVQ-AA¹⁷-RKI, SIPKAXX:VPTEL:RPVQ-AA¹⁷-RKI, HVTKPTX:APTKL:RPVQ-AA¹⁷-RKI, YVPKPXX:APTKL:RPVQ-AA¹⁷-RKI, TVPKPXX:APTQL:RPVQ-AA¹⁷-RKI, AVPKAXX:APTKL:RPVQ-AA¹⁷-RKI, KVGKAXX:VPTKL:RPVQ-AA¹⁷-RKI, KASKAXX:VPTKL:RPVQ-AA¹⁷-RKI, GSAGPXX:TPTKM:RPVQ-AA¹⁷-RKI, AAPASXX:VPARL:RPVQ-AA¹⁷-RKI, STPPTXX:VPTRL:RPVQ-AA¹⁷-RKI, HVPKPXX:APTKL:RPVQ-AA¹⁷-RKI, RVPSTXX:APVKT:RPVQ-AA¹⁷-RKI, ASAAPXX:VPQAL:RPVQ-AA¹⁷-RKI, ASASPXX:VSQDL:RPVQ-AA¹⁷-RKI, ASASPXX:VPQDL:RPVQ-AA¹⁷-RKI, NDEGLEX:VPTEE:RPVQ-AA¹⁷-RKI, NDEGLEX:VPTGQ:RPVQ-AA¹⁷-RKI and SSVKXQP:SRVHH:RPVQ-AA¹⁷-RKI; and wherein AA¹⁷ is selected from the group consisting of G, A, V, L, I, P, F, M, W, T and S (in particular is selected from the group consisting of M, I, L, V and T).

[0328] In certain embodiments, PEP11 is a peptide with 3 amino acids of general formula AA¹⁸-AA¹⁹-AA²⁰; wherein AA¹⁸ is selected from the group consisting of L, V, Q, A and R; wherein AA¹⁹ is selected from the group consisting of F, W, H, Y, I and K; wherein AA²⁰ is selected from the group consisting of L, F, Y, K, I, V and M. In one particular example, PEP11 is selected from the group consisting of LYL, LFF, LYF, LYY, LYK, LYI, LFI, LYV, VYY, QIM, AKV and RKI.

[0329] In certain embodiments, PEP1 is selected from the group consisting of SAIS, SSLS, NAIS, SATS, SPIS, EPIS, SPIN, KPLS, EPLP, EPLT, SNIT, RSVK and RPVQ; PEP11 is selected from the group consisting of LYL, LFF, LYF, LYY, LYK, LYI, LFI, LYV, VYY, QIM, AKV and RKI; and the pair PEP1:PEP11 is selected from the group consisting of SAIS:LYL, SSLS:LFF, NAIS:LYF, SATS:LYY, SPIS:LYK, SPIS:LYI, SPIS:LFI, EPIS:LYL, SPIN:LYF, KPLS:LYV, EPLP:VYY, EPLT:LYY, SNIT:QIM, RSVK:AKV and RPVQ:RKI.

[0330] In one particular example, said GFR-binding compound is a peptide, a variant or analog thereof, or a peptidomimetic as defined herein, with (comprising, or exclusively consisting of, or constituted of) between 8 and 30 (in particular between 8-25 or between 8-22, more particularly between 18-22, even more particularly between 19-21 or 20) amino acids, having the following general formula (III) (hereinafter may also be referred to as compound (III) or peptide (III)):

AA¹-AA²-AA³-AA⁴-AA⁵-AA⁶-AA⁷-AA⁸-AA⁹-AA¹⁰-AA¹¹-AA¹²-AA¹³-AA¹⁴-AA¹⁵-AA¹⁶-AA¹⁷-AA¹⁸-AA¹⁹-AA²⁰ (III)

[0331] wherein AA¹-AA²-AA³-AA⁴-AA⁵-AA⁶-AA⁷ is PEP7 as defined herein; wherein AA¹³-AA¹⁴-AA¹⁵-AA¹⁶-AA¹⁷-AA¹⁸-AA¹⁹-AA²⁰ is PEP12 as defined herein; wherein AA⁸-AA⁹-AA¹⁰ is PEP3 as defined herein; wherein AA¹¹ and AA¹² are as defined herein; wherein AA¹ may be an N-terminal amino acid or a C-terminal amino acid; wherein AA²⁰ may be an N-terminal amino acid or a C-terminal amino acid.

[0332] In one most particular example, the RMSD value of the three dimensional (3D) atomic coordinates of said GFR-binding compound as defined herein with respect to PEPREF is 2.45 Å (Angstroms) or less, in particular is 2 Å or less, and more particularly is 1.79 Å or less, and wherein PEPREF is the set of 3D atomic coordinates already defined herein (hereinafter may be referred to as “wherein the RMSD is 2.45 Å or less” for the sake of conciseness).

[0333] In one example, said GFR-binding compound is a synthetic molecule as defined herein in the definition section.

[0334] In one particular example, said GFR-binding compound is a synthetic peptide, or a variant or analog thereof, or a peptidomimetic.

[0335] In one most particular example, said GFR-binding compound is a non-cyclic synthetic peptide.

[0336] In one example, a length of said GFR-binding compound, in solution, such as in a physiologically acceptable solvent such as water or PBS, is comprised between about 6 and about 20 nm, preferably between about 6 and about 16 nm, as determined using the standard «3D» procedure described above.

[0337] In one particular example, said GFR-binding compounds may be any one or a plurality of of peptides of SEQ ID NO: 1 to 4716.

[0338] II.2. Cyclic GFR-Binding Compounds

[0339] In one example, said cyclic GFR-binding compound has a molecular weight of less than 5,000 Daltons. In one particular example, said cyclic GFR-binding compound has a molecular weight of less than 4,000 Daltons. In one particular example, said cyclic GFR-binding compound has a molecular weight comprised between 1,000 and 5,000 Daltons. In one particular example, said cyclic GFR-binding compound has a molecular weight comprised between 1,000 and 4,000 Daltons.

[0340] In one example, said cyclic GFR-binding compound has a molecular weight of less than 7,000 Daltons. In one example, said cyclic GFR-binding compound has a molecular weight of less than 6,000 Daltons. In one example, said cyclic GFR-binding compound has a molecular weight of less than 5,000 Daltons. In one particular example, said cyclic GFR-binding compound has a molecular weight comprised between 1,000 and 7,000 Daltons. In one particular example, said cyclic GFR-binding compound has a molecular weight comprised between 1,000 and 6,000 Daltons. In one particular example, said cyclic GFR-binding compound has a molecular weight comprised between 2,000 and 7,000 Daltons. In one particular example, said cyclic GFR-binding compound has a molecular weight comprised between 2,000 and 6,000 Daltons.

[0341] In one particular example, the growth factor receptor involved in the interaction with said cyclic GFR-binding compound is an epidermal growth factor receptor. In one particular example, the growth factor receptor involved in the interaction with said cyclic GFR-binding compound is a fibroblast growth factor receptor. In one particular example, the growth factor receptor involved in the interaction with said cyclic GFR-binding compound is a vascular endothelial growth factor receptor. In one particular example, the growth factor receptor involved in the interaction with said cyclic GFR-binding compound is a nerve growth factor receptor. In one particular example, the growth factor receptor involved in the interaction with said cyclic GFR-binding compound is a hepatocyte growth factor receptor. In one particular example, the growth factor receptor involved in the interaction with said cyclic GFR-binding compound is a somatomedin or insulin-like growth factor receptor. In one particular example, the growth factor receptor involved in the interaction with said cyclic GFR-binding compound is a platelet-derived growth factor receptor. In one particular example, the growth factor receptor involved in the interaction with said cyclic GFR-binding compound is a protein from the transforming growth factor beta (TGF-b) superfamily.

[0342] In one particular example, the growth factor receptor(s) involved in the interaction with said cyclic GFR-binding compound is (are) preferably selected from epidermal growth factor receptors, fibroblast growth factor receptors, vascular endothelial growth factor receptors, nerve growth factor receptors, hepatocyte growth factor receptors, somatomedin or insulin-like growth factor receptors, platelet-derived growth factor receptors, and transforming growth factor beta (TGF-b) superfamily proteins.

[0343] In one particular example, said cyclic GFR-binding compound is a peptide, or a variant or analog thereof, having growth factor receptor-binding capability or capabilities, with (exclusively consisting of, or constituted of) between 10-60 amino acids, in particular between 10-55 amino acids, more particularly between 15-60 amino acids, and even more particularly between 15-55 amino acids, or between 10-35 amino acids, in particular between 15-35 amino acids, more particularly between 10-30 amino acids, and even more particularly between 15-30 amino acids.

[0344] In one particular example, said cyclic GFR-binding compound is a cyclic peptidomimetic as defined herein, having growth factor receptor-binding capability or capabilities, comprising (consecutively or non consecutively) between 10-60 amino acids, in particular between 10-55 amino acids, more particularly between 15-60 amino acids, and even more particularly between 15-55 amino acids, or between 10-35 amino acids, in particular between 15-35 amino acids, more particularly between 10-30 amino acids, and even more particularly between 15-30 amino acids; wherein said cyclic GFR-binding compound has a molecular weight comprised between 1,000 and 7,000 Daltons (in particular, between 1,000 and 6,000 Da).

[0345] In one particular example, said cyclic GFR-binding compound is a cyclic peptidomimetic as defined herein, having growth factor receptor-binding capability or capabilities, comprising (consecutively or non consecutively) between 10-60 amino acids, in particular between 10-55 amino acids, more particularly between 15-60 amino acids, and even more particularly between 15-55 amino acids, or between 10-35 amino acids, in particular between 15-35 amino acids, more particularly between 10-30 amino acids, and even more particularly between 15-30 amino acids; and containing at least one peptide portion or fragment with between 5-20 amino acids (in particular containing one peptide portion or fragment with between 5-20 amino acids); wherein said cyclic GFR-binding compound has a molecular weight comprised between 1,000 and 7,000 Daltons (in particular, between 1,000 and 6,000 Da).

[0346] In one aspect, the present disclosure provides a cyclic GFR-binding compound, wherein said cyclic GFR-binding compound is a cyclic peptide, a variant or analog thereof, or a cyclic peptidomimetic as defined herein, having growth factor receptor-binding capability or capabilities, having a molecular weight of less than 7,000 Da, in particular of between 1,000 and 7,000 Da, more particularly of between 1,000 and 6,000 Da.

[0347] In one aspect, the present disclosure provides a cyclic GFR-binding compound, wherein said cyclic GFR-binding compound is a cyclic peptide, a variant or analog thereof, or a cyclic peptidomimetic as defined herein, having growth factor receptor-binding capability or capabilities, with between 10-60 (in particular between 15-60, more particularly between 10-55, and even more particularly between 15-55) amino acids or with between 10-35 (in particular between 15-35, more particularly between 10-30, and even more particularly between 15-30) amino acids, comprising a peptide with four amino acids (PEP1).

[0348] In one aspect, the present disclosure provides a cyclic GFR-binding compound, wherein said cyclic GFR-binding compound is a cyclic peptide, a variant or analog thereof, or a cyclic peptidomimetic as defined herein, with between 10-60 (in particular between 15-60, more particularly between 10-55, and even more particularly between 15-55) amino acids or with between 10-35 (in particular between 15-35, more particularly between 10-30, and even more particularly between 15-30) amino acids, comprising a peptide with eight amino acids (PEP12).

[0349] In one aspect, the present disclosure provides a cyclic GFR-binding compound, wherein said cyclic GFR-binding compound is a cyclic peptide, a variant or analog thereof, or a cyclic peptidomimetic as defined herein, with between 10-60 (in particular between 15-60, more particularly between 10-55, and even more particularly between 15-55) amino acids or with between 10-35 (in particular between 15-35, more particularly between 10-30, and even more particularly between 15-30) amino acids, comprising a peptide with four amino acids (PEP1); wherein said cyclic GFR-binding compound further comprises a peptide with three amino acids (PEP3).

[0350] In one aspect, the present disclosure provides a cyclic GFR-binding compound, wherein said cyclic GFR-binding compound is a cyclic peptide, a variant or analog thereof, or a cyclic peptidomimetic as defined herein, with between 10-60 (in particular between 15-60, more particularly between 10-55, and even more particularly between 15-55) amino acids or with between 10-35 (in particular between 15-35, more particularly between 10-30, and even more particularly between 15-30) amino acids, comprising a peptide with eight amino acids (PEP12); wherein said cyclic GFR-binding compound further comprises a peptide with three amino acids (PEP3).

[0351] In one aspect, the present disclosure provides a cyclic GFR-binding compound, wherein said cyclic GFR-binding compound is a cyclic peptide, a variant or analog thereof, or a cyclic peptidomimetic as defined herein, with between 10-60 (in particular between 15-60, more particularly between 10-55, and even more particularly between 15-55) amino acids or with between 10-35 (in particular between 15-35, more particularly between 10-30, and even more particularly between 15-30) amino acids, comprising a peptide with four amino acids (PEP1); wherein said cyclic GFR-binding compound further comprises a peptide with five amino acids (PEP5).

[0352] In one aspect, the present disclosure provides a cyclic GFR-binding compound, wherein said cyclic GFR-binding compound is a cyclic peptide, a variant or analog thereof, or a cyclic peptidomimetic as defined herein, with between 10-60 (in particular between 15-60, more particularly between 10-55, and even more particularly between 15-55) amino acids or with between 10-35 (in particular between 15-35, more particularly between 10-30, and even more particularly between 15-30) amino acids, comprising a peptide with eight amino acids (PEP12); wherein said cyclic GFR-binding compound further comprises a peptide with five amino acids (PEP5).

[0353] In one aspect, the present disclosure provides a cyclic GFR-binding compound, wherein said cyclic GFR-binding compound is a cyclic peptide, a variant or analog thereof, or a cyclic peptidomimetic as defined herein, with between 10-60 (in particular between 15-60, more particularly between 10-55, and even more particularly between 15-55) amino acids or with between 10-35 (in particular between 15-35, more particularly between 10-30, and even more particularly between 15-30) amino acids, comprising a peptide with four amino acids (PEP1); wherein said cyclic GFR-binding compound further comprises a peptide with between six and twelve amino acids (PEP9).

[0354] In one aspect, the present disclosure provides a cyclic GFR-binding compound, wherein said cyclic GFR-binding compound is a cyclic peptide, a variant or analog thereof, or a cyclic peptidomimetic as defined herein, with between 10-60 (in particular between 15-60, more particularly between 10-55, and even more particularly between 15-55) amino acids or with between 10-35 (in particular between 15-35, more particularly between 10-30, and even more particularly between 15-30) amino acids, comprising a peptide with eight amino acids (PEP12); wherein said cyclic GFR-binding compound further comprises a peptide with between six and twelve amino acids (PEP9).

[0355] In one aspect, the present disclosure provides a cyclic GFR-binding compound, wherein said cyclic GFR-binding compound is a cyclic peptide, a variant or analog thereof, or a cyclic peptidomimetic as defined herein, with between 10-60 (in particular between 15-60, more particularly between 10-55, and even more particularly between 15-55) amino acids or with between 10-35 (in particular between 15-35, more particularly between 10-30, and even more particularly between 15-30) amino acids, comprising a peptide with four amino acids (PEP1); wherein said cyclic GFR-binding compound further comprises a peptide with three amino acids (PEP3), and an amino acid or a peptide with between two and seven amino acids (PEP7).

[0356] In one aspect, the present disclosure provides a cyclic GFR-binding compound, wherein said cyclic GFR-binding compound is a cyclic peptide, a variant or analog thereof, or a cyclic peptidomimetic as defined herein, with between 10-60 (in particular between 15-60, more particularly between 10-55, and even more particularly between 15-55) amino acids or with between 10-35 (in particular between 15-35, more particularly between 10-30, and even more particularly between 15-30) amino acids, comprising a peptide with four amino acids (PEP12); wherein said cyclic GFR-binding compound further comprises a peptide with three amino acids (PEP3), and an amino acid or a peptide with between two and seven amino acids (PEP7).

[0357] In one aspect, the present disclosure provides a cyclic GFR-binding compound, wherein said cyclic GFR-binding compound is a cyclic peptide, a variant or analog thereof, or a cyclic peptidomimetic as defined herein, with between 10-60 (in particular between 15-60, more particularly between 10-55, and even more particularly between 15-55) amino acids or with between 10-35 (in particular between 15-35, more particularly between 10-30, and even more particularly between 15-30) amino acids, comprising a peptide with four amino acids (PEP1); wherein said cyclic GFR-binding compound further comprises a peptide with five amino acids (PEP5), and an amino acid or a peptide with between two and seven amino acids (PEP7).

[0358] In one aspect, the present disclosure provides a cyclic GFR-binding compound, wherein said cyclic GFR-binding compound is a cyclic peptide, a variant or analog thereof, or a cyclic peptidomimetic as defined herein, with between 10-60 (in particular between 15-60, more particularly between 10-55, and even more particularly between 15-55) amino acids or with between 10-35 (in particular between 15-35, more particularly between 10-30, and even more particularly between 15-30) amino acids, comprising a peptide with four amino acids (PEP12); wherein said cyclic GFR-binding compound further comprises a peptide with five amino acids (PEP5), and an amino acid or a peptide with between two and seven amino acids (PEP7).

[0359] In one aspect, the present disclosure provides a cyclic GFR-binding compound, wherein said cyclic GFR-binding compound is a cyclic peptide, a variant or analog thereof, or a cyclic peptidomimetic as defined herein, with between 10-60 (in particular between 15-60, more particularly between 10-55, and even more particularly between 15-55) amino acids or with between 10-35 (in particular between 15-35, more particularly between 10-30, and even more particularly between 15-30) amino acids, comprising a peptide, a variant or analog thereof, or a peptidomimetic having the following general formula (IIIa) (hereinafter may also be referred to as compound (IIIa) or peptide (IIIa)):

PEP(A)-LINKER (IIIa)

[0360] wherein one end of LINKER interacts covalently with one end of PEP(A); wherein PEP(A) comprises PEP1 or PEP12; wherein LINKER is a linear or branched organic divalent radical, moiety or compound having a molecular weight (Mw) comprised between 450 and 4,500 Daltons, in particular comprised between about 600 and about 4,500 Da, more particularly between about 600 and about 4,000 Da, and even more particularly between about 600 and about 3,500 Da.

[0361] In one aspect, the present disclosure provides a cyclic GFR-binding compound, wherein said cyclic GFR-binding compound is a cyclic peptide, a variant or analog thereof, or a cyclic peptidomimetic as defined herein, with between 10-60 (in particular between 15-60, more particularly between 10-55, and even more particularly between 15-55) amino acids or with between 10-35 (in particular between 15-35, more particularly between 10-30, and even more particularly between 15-30) amino acids, comprising a peptide, a variant or analog thereof, or a peptidomimetic having the following general formula (IIIb) (hereinafter may also be referred to as compound (IIIb) or peptide (IIIb)):

LINKER-PEP(A)-LINKER (IIIb)

[0362] wherein one end of a first LINKER interacts covalently with one end of PEP(A); wherein one end of a second LINKER interacts covalently with another end of PEP(A); wherein another end of a first LINKER interacts covalently with another end of a second LINKER; wherein PEP(A) comprises PEP1 or PEP12; wherein LINKER are independently a linear or branched organic divalent radical, moiety or compound having a molecular weight (Mw) comprised between 450 and 4,500 Daltons, in particular comprised between about 600 and about 4,500 Da, more particularly between about 600 and about 4,000 Da, and even more particularly between about 600 and about 3,500 Da.

[0363] In the present description, the molecular weight of LINKER refer to the calculated molecular weight prior to being connected to/reacted with any of the elements it is configured to connect to or react with e.g. PEP(A), or any other groups defined herein.

[0364] In one aspect, the present disclosure provides a cyclic GFR-binding compound comprising compounds (IIIa) or (IIIb), wherein PEP(A) further comprises PEP3.

[0365] In one aspect, the present disclosure provides a cyclic GFR-binding compound comprising compounds (IIIa) or (IIIb), wherein PEP(A) further comprises PEP5.

[0366] In one aspect, the present disclosure provides a cyclic GFR-binding compound comprising compounds (IIIa) or (IIIb), wherein PEP(A) further comprises PEP9.

[0367] In one aspect, the present disclosure provides a cyclic GFR-binding compound comprising compounds (IIIa) or (IIIb), wherein PEP(A) further comprises PEP3 and PEP7.

[0368] In one aspect, the present disclosure provides a cyclic GFR-binding compound comprising compounds (IIIa) or (IIIb), wherein PEP(A) further comprises PEP5 and PEP7.

[0369] In one aspect, the present disclosure provides a cyclic GFR-binding compound, wherein said cyclic GFR-binding compound is a cyclic peptide, a variant or analog thereof, or a cyclic peptidomimetic as defined herein, with between 10-60 (in particular between 15-60, more particularly between 10-55, and even more particularly between 15-55) amino acids or with between 10-35 (in particular between 15-35, more particularly between 10-30, and even more particularly between 15-30) amino acids, comprising a peptide, a variant or analog thereof, or a peptidomimetic having the following general formula (IVa) (hereinafter may also be referred to as compound (IVa) or peptide (IVa)):

PEP(C)-PEP12-LINKER (IVa)

[0370] wherein LINKER is a linear or branched organic divalent radical, moiety or compound having a molecular weight (Mw) comprised between 450 and 4,500 Daltons, in particular comprised between about 600 and about 4,500 Da, more particularly between about 600 and about 4,000 Da, and even more particularly between about 600 and about 3,500 Da; wherein PEP12 is a peptide with 8 amino acids of formula PEP1-AA¹⁷-PEP11 as defined herein; wherein PEP2 is a peptide with five amino acids as already defined herein; wherein one end of PEP(C) interacts covalently with PEP12 via one end of PEP1; wherein one end of LINKER interacts covalently with one end of PEP12 via one end of PEP11; wherein PEP(C) is a peptide with at least 5 amino acids, in particular a peptide with between 5 and 12 amino acids.

[0371] In one aspect, the present disclosure provides a cyclic GFR-binding compound, wherein said cyclic GFR-binding compound is a cyclic peptide, a variant or analog thereof, or a cyclic peptidomimetic as defined herein, with between 10-60 (in particular between 15-60, more particularly between 10-55, and even more particularly between 15-55) amino acids or with between 10-35 (in particular between 15-35, more particularly between 10-30, and even more particularly between 15-30) amino acids, comprising a peptide, a variant or analog thereof, or a peptidomimetic having the following general formula (IVb) (hereinafter may also be referred to as compound (IVb) or peptide (IVb)):

LINKER-PEP(C)-PEP12-LINKER (IVb)

[0372] wherein LINKER are independently a linear or branched organic divalent radical, moiety or compound having a molecular weight (Mw) comprised between 450 and 4,500 Daltons, in particular comprised between about 600 and about 4,500 Da, more particularly between about 600 and about 4,000 Da, and even more particularly between about 600 and about 3,500 Da; wherein PEP12 is a peptide with 8 amino acids of formula PEP1-AA¹⁷-PEP11 as defined herein; wherein PEP2 is a peptide with five amino acids as already defined herein; wherein one end of PEP(C) interacts covalently with PEP12 via one end of PEP1; wherein one end of a first LINKER interacts covalently with one end of PEP12 via one end of PEP11; wherein one end of a second LINKER interacts covalently with another end of PEP(C); wherein another end of a first LINKER interacts covalently with another end of a second LINKER; wherein PEP(C) is a peptide with at least 5 amino acids, in particular a peptide with between 5 and 12 amino acids.

[0373] In one aspect, the present disclosure provides a cyclic GFR-binding compound comprising compound (IVa) or (IVb), wherein PEP(C) comprises PEP3.

[0374] In one aspect, the present disclosure provides a cyclic GFR-binding compound comprising compound (IVa) or (IVb), wherein PEP(C) comprises PEP5. In one particular example, PEP(C) is PEP5.

[0375] In one aspect, the present disclosure provides a cyclic GFR-binding compound comprising compound (IVa) or (IVb), wherein PEP(C) comprises PEP9. In one particular example, PEP(C) is PEP9.

[0376] In one aspect, the present disclosure provides a cyclic GFR-binding compound comprising compound (IVa) or (IVb), wherein PEP(C) comprises PEP3 and PEP7.

[0377] In one aspect, the present disclosure provides a cyclic GFR-binding compound comprising compound (IVa) or (IVb), wherein PEP(C) comprises PEPS and PEP7.

[0378] In one aspect, the present disclosure provides a cyclic GFR-binding compound comprising compound (IVa) or (IVb), wherein PEP(C) is PEPS or PEP9.

[0379] In one aspect, the present disclosure provides a cyclic GFR-binding compound, wherein said cyclic GFR-binding compound is a cyclic peptide, a variant or analog thereof, or a cyclic peptidomimetic as defined herein, with between 10-60 (in particular between 15-60, more particularly between 10-55, and even more particularly between 15-55) amino acids or with between 10-35 (in particular between 15-35, more particularly between 10-30, and even more particularly between 15-30) amino acids, comprising a peptide, a variant or analog thereof, or a peptidomimetic having the following general formula (Va) (hereinafter may also be referred to as compound (Va) or peptide (Va)):

PEP7-PEP5-PEP12-LINKER (Va)

[0380] wherein LINKER is a linear or branched organic divalent radical, moiety or compound having a molecular weight (Mw) comprised between 450 and 4,500 Daltons, in particular comprised between about 600 and about 4,500 Da, more particularly between about 600 and about 4,000 Da, and even more particularly between about 600 and about 3,500 Da; wherein PEP12 is a peptide with 8 amino acids of formula PEP1-AA¹⁷-PEP11 as defined herein; wherein PEP5 is a peptide with five amino acids as already defined herein; wherein PEP7 an amino acid or a peptide with between two and seven amino acids as already defined herein; wherein one end of LINKER interacts covalently with one end of PEP12 via AA²⁰; wherein one end of PEP5 interacts covalently with another end of PEP12 via AA¹²; wherein another end of PEP5 interacts covalently with one end of PEP7 via AA⁸.

[0381] In one aspect, the present disclosure provides a cyclic GFR-binding compound, wherein said cyclic GFR-binding compound is a cyclic peptide, a variant or analog thereof, or a cyclic peptidomimetic as defined herein, with between 10-60 (in particular between 15-60, more particularly between 10-55, and even more particularly between 15-55) amino acids or with between 10-35 (in particular between 15-35, more particularly between 10-30, and even more particularly between 15-30) amino acids, comprising a peptide, a variant or analog thereof, or a peptidomimetic having the following general formula (Vb) (hereinafter may also be referred to as compound (Vb) or peptide (Vb)):

LINKER-PEP7-PEP5-PEP12-LINKER (Vb)

[0382] wherein LINKER are independently a linear or branched organic divalent radical, moiety or compound having a molecular weight (Mw) comprised between 450 and 4,500 Daltons, in particular comprised between about 600 and about 4,500 Da, more particularly between about 600 and about 4,000 Da, and even more particularly between about 600 and about 3,500 Da; wherein PEP12 is a peptide with 8 amino acids of formula PEP1-AA¹⁷-PEP11 as defined herein; wherein PEP5 is a peptide with five amino acids as already defined herein; wherein PEP7 an amino acid or a peptide with between two and seven amino acids as already defined herein; wherein one end of PEP5 interacts covalently with another end of PEP12 via AA¹²; wherein another end of PEP5 interacts covalently with one end of PEP7 via AA⁸; wherein one end of a first LINKER interacts covalently with one end of PEP12 via AA²⁰; wherein one end of a second LINKER interacts covalently with another end of PEP7; wherein another end of a first LINKER interacts covalently with another end of a second LINKER.

[0383] In one aspect, the present disclosure provides a cyclic GFR-binding compound, wherein said cyclic GFR-binding compound is a cyclic peptide, a variant or analog thereof, or a cyclic peptidomimetic as defined herein, with between 10-60 (in particular between 15-60, more particularly between 10-55, and even more particularly between 15-55) amino acids or with between 10-35 (in particular between 15-35, more particularly between 10-30, and even more particularly between 15-30) amino acids, comprising a peptide, a variant or analog thereof, or a peptidomimetic having the following general formula (VIa) (hereinafter may also be referred to as compound (VIa) or peptide (VIa)):

AA¹-AA²-AA³-AA⁴-AA⁵-AA⁶-AA⁷-AA⁸-AA⁹-AA¹⁰-AA¹¹-AA¹²-AA¹³-AA¹⁴-AA¹⁵-AA¹⁶-AA¹⁷-AA¹⁸-AA¹⁹-AA²⁰-LINKER (VIa)

[0384] wherein LINKER is a linear or branched organic divalent radical, moiety or compound having a molecular weight (Mw) comprised between 450 and 4,500 Daltons, in particular comprised between about 600 and about 4,500 Da, more particularly between about 600 and about 4,000 Da, and even more particularly between about 600 and about 3,500 Da; wherein AA¹-AA²-AA³-AA⁴-AA⁵-AA⁶-AA⁷ is PEP7 as defined herein; wherein AA¹³-AA¹⁴-AA¹⁵-AA¹⁶-AA¹⁷-AA¹⁸-AA¹⁹-AA²⁰ is PEP12 as defined herein; wherein AA⁸-AA⁹-AA¹⁰ is PEP3 as defined herein; wherein AA¹¹ and AA¹² are as defined herein; wherein one end of LINKER interacts covalently with AA²⁰; wherein AA¹ may be an N-terminal amino acid or a C-terminal amino acid; wherein AA²⁰ may be an N-terminal amino acid or a C-terminal amino acid.

[0385] In one aspect, the present disclosure provides a cyclic GFR-binding compound, wherein said cyclic GFR-binding compound is a cyclic peptide, a variant or analog thereof, or a cyclic peptidomimetic as defined herein, with between 10-60 (in particular between 15-60, more particularly between 10-55, and even more particularly between 15-55) amino acids or with between 10-35 (in particular between 15-35, more particularly between 10-30, and even more particularly between 15-30) amino acids, comprising a peptide, a variant or analog thereof, or a peptidomimetic having the following general formula (VIb) (hereinafter may also be referred to as compound (VIb) or peptide (VIb)):

LINKER-AA¹-AA²-AA³-AA⁴-AA⁵-AA⁶-AA⁷-AA⁸-AA⁹-AA¹⁰-AA¹¹-AA¹²-AA¹³-AA¹⁴-AA¹⁵-AA¹⁶-AA¹⁷-AA¹⁸-AA¹⁹-AA²⁰-LINKER (VIb)

[0386] wherein LINKER are independently a linear or branched organic divalent radical, moiety or compound having a molecular weight (Mw) comprised between 450 and 4,500 Daltons, in particular comprised between about 600 and about 4,500 Da, more particularly between about 600 and about 4,000 Da, and even more particularly between about 600 and about 3,500 Da; wherein AA¹-AA²-AA³-AA⁴-AA⁵-AA⁶-AA⁷ is PEP7 as defined herein; wherein AA¹³-AA¹⁴-AA¹⁵-AA¹⁶-AA¹⁷-AA¹⁸-AA¹⁹-AA²⁰ is PEP12 as defined herein; wherein AA⁸-AA⁹-AA¹⁰ is PEP3 as defined herein; wherein AA¹¹ and AA¹² are as defined herein; wherein one end of a first LINKER interacts covalently with AA²⁰; wherein one end of a second LINKER interacts covalently with AA¹; wherein another end of a first LINKER interacts covalently with another end of a second LINKER; wherein one end of the first LINKER may be an N-terminal amino acid or a C-terminal amino acid.

[0387] In one aspect, the present disclosure provides a cyclic GFR-binding compound, wherein said cyclic GFR-binding compound is a cyclic peptide, a variant or analog thereof, or a cyclic peptidomimetic as defined herein, with between 10-60 (in particular between 10-55, more particularly between 15-60, and even more particularly between 15-55) amino acids, or between 10-35 (in particular between 10-30, more particularly between 15-35, and even more particularly between 15-30) amino acids, comprising two LINKERs.

[0388] In one aspect, the present disclosure provides a cyclic GFR-binding compound, wherein said cyclic GFR-binding compound is a cyclic peptide, a variant or analog thereof, or a cyclic peptidomimetic as defined herein, with between 10-60 (in particular between 15-60, more particularly between 10-55, and even more particularly between 15-55) amino acids or with between 10-35 (in particular between 15-35, more particularly between 10-30, and even more particularly between 15-30) amino acids, having any one of the following schematic general formulae (VII) to (XX) (hereinafter may also be referred to as compounds (VII) to (XX) or peptides (VII) to (XX)):

[0389] wherein LINKER is a linear or branched organic divalent radical, moiety or compound having a molecular weight (Mw) comprised between 450 and 4,500 Daltons, in particular comprised between about 600 and about 4,500 Da, more particularly between about 600 and about 4,000 Da, and even more particularly between about 600 and about 3,500 Da; wherein PEP12 is a peptide with 8 amino acids of formula PEP1-AA¹⁷-PEP11 as defined herein; wherein PEP5 is a peptide with five amino acids as already defined herein; wherein PEP7 an amino acid or a peptide with between two and seven amino acids as already defined herein; wherein PEP9 is a peptide with between six and twelve amino acids; wherein curved lines represents covalent bonds between LINKER and PEP1 to PEP12. Curved lines' lengths may not be representative of the actual relative distance between the LINKERs and PEP1 to PEP12.

[0390] In one aspect, the present disclosure provides a cyclic GFR-binding compound, wherein said cyclic GFR-binding compound is a cyclic peptide, a variant or analog thereof, or a cyclic peptidomimetic as defined herein, with between 10-60 (in particular between 15-60, more particularly between 10-55, and even more particularly between 15-55) amino acids or with between 10-35 (in particular between 15-35, more particularly between 10-30, and even more particularly between 15-30) amino acids, having any one of the following schematic general formulae (XXI) to (XXIII) (hereinafter may also be referred to as compounds (XX) to (XXIII) or peptides (XX) to (XXIII)):

[0391] wherein LINKER is a linear or branched organic divalent radical, moiety or compound having a molecular weight (Mw) comprised between 450 and 4,500 Daltons, in particular comprised between about 600 and about 4,500 Da, more particularly between about 600 and about 4,000 Da, and even more particularly between about 600 and about 3,500 Da; wherein AA¹³-AA¹⁴-AA¹⁵-AA¹⁶-AA¹⁷-AA¹⁸-AA¹⁹-AA²⁰ is PEP12 as defined herein; wherein AA⁸-AA⁹-AA¹⁰ is PEP3 as defined herein; wherein AA¹¹ and AA¹² are as defined herein; wherein one end of LINKER interacts covalently with AA¹⁶ or AA²⁰; wherein another end of LINKER interacts covalently with AA⁸ or AA¹³; wherein curved lines represents covalent bonds between LINKER and AAs. Curved lines' lengths may not be representative of the actual relative distance between the LINKER and the AAs.

[0392] In certain embodiments, PEP1 is selected from the group consisting of SAIS, SSLS, NAIS, SATS, SPIS, EPIS, SPIN, KPLS, EPLP, EPLT, SNIT, RSVK and RPVQ.

[0393] In certain embodiments, PEP3 is selected from the group consisting of VPT, VPE, APT, TPT, VPA, APV, VPQ, VSQ, SRV and TQV.

[0394] In certain embodiments, PEP5 is a peptide of general formula PEP3-AA¹¹-AA¹²; wherein PEP3 is selected from the group consisting of VPT, VPE, APT, TPT, VPA, APV, VPQ, VSQ, SRV and TQV; wherein AA¹¹ is selected from the group consisting of E, K, Q, R, A, D, G and H; and wherein AA¹² is selected from the group consisting of L, M, T, E, Q and H. In one particular example, PEP5 is selected from the group consisting of VPTEL, VPEKM, APTKL, APTQL, VPTKL, TPTKM, VPARL, VPTRL, APVKT, VPQAL, VSQDL, VPQDL, VPTEE, VPTGQ, SRVHH and TQVQL.

[0395] In certain embodiments, PEP7 is an amino acid or a peptide with between two and seven amino acids of general formula AA¹-AA²-AA³-AA⁴-AA⁵-AA⁶-AA⁷; wherein wherein AA¹, AA², AA³, AA⁴, and AA⁵ are independently absent or AA^{I} as defined herein; wherein AA⁶ is absent or selected from the group consisting of S, T, C, E, Q, P and R; wherein AA⁷ is absent or is selected from the group consisting of S, T, C, E, Q, P and R, and wherein at least one of AA¹, AA², AA³, AA⁴, AA⁵, AA⁶ or AA⁷ is not absent. In one particular example, PEP7 is selected from the group consisting of KIPKAXX, GIPEPXX, SIPKAXX, HVTKPTX, YVPKPXX, TVPKPXX, AVPKAXX, KVGKAXX, KASKAXX, GSAGPXX, AAPASXX, STPPTXX, HVPKPXX, RVPSTXX, ASAAPXX, ASASPXX, NDEGLEX, SSVKXQP and RNVQXRP, wherein X is C or S throughout the present description.

[0396] In certain embodiments, PEP9 is a peptide of general formula PEP7-PEP5; wherein PEP5 is a peptide of formula PEP3-AA¹¹-AA¹²; wherein PEP3 is selected from the group consisting of VPT, VPE, APT, TPT, VPA, APV, VPQ, VSQ, SRV and TQV; wherein AA¹¹ is selected from the group consisting of E, K, Q, R, A, D, G and H; and wherein AA¹² is selected from the group consisting of L, M, T, E, Q and H; wherein PEP7 is an amino acid or a peptide with between two and seven amino acids of general formula AA¹-AA²-AA³-AA⁴-AA⁵-AA⁶-AA⁷; wherein AA¹, AA², AA³, AA⁴, and AA⁵ are independently absent or AA^{I} as defined herein; wherein AA⁶ is absent or selected from the group consisting of S, T, C, E, Q, P and R; wherein AA⁷ is absent or is selected from the group consisting of S, T, C, E, Q, P and R. In one particular example, PEP9 is selected from the group consisting of KIPKAXXVPTEL, GIPEPXXVPEKM, SIPKAXXVPTEL, HVTKPTXAPTKL, YVPKPXXAPTKL, TVPKPXXAPTQL, AVPKAXXAPTKL, KVGKAXXVPTKL, KASKAXXVPTKL, GSAGPXXTPTKM, AAPASXXVPARL, STPPTXXVPTRL, HVPKPXXAPTKL, RVPSTXXAPVKT, ASAAPXXVPQAL, ASASPXXVSQDL, ASASPXXVPQDL, NDEGLEXVPTEE, NDEGLEXVPTGQ, SSVKXQPSRVHH and RNVQXRPTQVQL, wherein X is C or S throughout the present description.

[0397] In certain embodiments, PEP12 is a peptide of general formula PEP1-AA¹⁷-PEP11; wherein AA¹⁷ is selected from the group consisting of G, A, V, L, I, P, F, M, W, T and S (in particular is selected from the group consisting of M, I, L, V and T); wherein PEP1 is selected from the group consisting of SAIS, SSLS, NAIS, SATS, SPIS, EPIS, SPIN, KPLS, EPLP, EPLT, SNIT, RSVK and RPVQ.

[0398] In certain embodiments, PEP11 is a peptide with 3 amino acids of general formula AA¹⁸-AA¹⁹-AA²⁰; wherein AA¹⁸ is selected from the group consisting of L, V, Q, A and R; wherein AA¹⁹ is selected from the group consisting of F, W, H, Y, I and K; wherein AA²⁰ is selected from the group consisting of L, F, Y, K, I, V and M. In one particular example, PEP11 is selected from the group consisting of LYL, LFF, LYF, LYY, LYK, LYI, LFI, LYV, VYY, QIM, AKV and RKI.

[0399] In certain embodiments, PEP7 is selected from the group consisting of KIPKAXX, GIPEPXX, SIPKAXX, HVTKPTX, YVPKPXX, TVPKPXX, AVPKAXX, KVGKAXX, KASKAXX, GSAGPXX, AAPASXX, STPPTXX, HVPKPXX, RVPSTXX, ASAAPXX, ASASPXX, NDEGLEX, SSVKXQP and RNVQXRP; wherein PEP8 is selected from the group consisting of GXGXR, SXAXR, SXGXH, AXGXH, XGXR, EXGXR, RXGXS, AXGXR, SXGXR, XGXL, XKXS, KXEXR, QXEXR, LEXAXA and LAXKXE; and wherein the pair PEP7:PEP8 is selected from the group consisting of KIPKAXX:GXGXR, GIPEPXX:SXAXR, SIPKAXX:GXGXR, HVTKPTX:SXGXH, YVPKPXX:SXGXH, TVPKPXX:AXGXH, AVPKAXX:AXGXH, KVGKAXX:XGXR, KASKAXX:EXGXR, GSAGPXX:RXGXS, AAPASXX:AXGXR, STPPTXX:SXGXR, HVPKPXX:SXGXH, RVPSTXX:XGXL, ASAAPXX:XKXS, ASASPXX:XKXS, NDEGLEX:KXEXR, NDEGLEX:QXEXR, SSVKXQP:LEXAXA and RNVQXRP:LAXKXE.

[0400] In certain embodiments, PEP1 is selected from the group consisting of SAIS, SSLS, NAIS, SATS, SPIS, EPIS, SPIN, KPLS, EPLP, EPLT, SNIT, RSVK and RPVQ; PEP11 is selected from the group consisting of LYL, LFF, LYF, LYY, LYK, LYI, LFI, LYV, VYY, QIM, AKV and RKI; and the pair PEP1:PEP11 is selected from the group consisting of SAIS:LYL, SSLS:LFF, NAIS:LYF, SATS:LYY, SPIS:LYK, SPIS:LYI, SPIS:LFI, EPIS:LYL, SPIN:LYF, KPLS:LYV, EPLP:VYY, EPLT:LYY, SNIT:QIM, RSVK:AKV and RPVQ:RKI.

[0401] In particular, in certain embodiments, the pair PEP3:PEP1 is selected from the group consisting of

VPT:SAIS, VPE:SAIS, APT:SAIS, TPT:SAIS, VPA:SAIS,
APV:SAIS, VPQ:SAIS, VSQ:SAIS, SRV:SAIS, TQV:SAIS,
VPE:SSLS, VPT:SSLS, APT:SSLS, TPT:SSLS, VPA:SSLS,
APV:SSLS, VPQ:SSLS, VSQ:SSLS, SRV:SSLS, TQV:SSLS,
APT:NAIS, VPT:NAIS, VPE:NAIS, TPT:NAIS, VPA:NAIS,
APV:NAIS, VPQ:NAIS, VSQ:NAIS, SRV:NAIS, TQV:NAIS,
APT:SATS, VPT:SATS, VPE:SATS, TPT:SATS, VPA:SATS,
APV:SATS, VPQ:SATS, VSQ:SATS, SRV:SATS, TQV:SATS,
VPT:SPIS, VPE:SPIS, APT:SPIS, TPT:SPIS, VPA:SPIS,
APV:SPIS, VPQ:SPIS, VSQ:SPIS, SRV:SPIS, TQV:SPIS,
VPT:EPIS, VPE:EPIS, APT:EPIS, TPT:EPIS, VPA:EPIS,
APV:EPIS, VPQ:EPIS, VSQ:EPIS, SRV:EPIS, TQV:EPIS,
TPT:SPIN, VPT:SPIN, VPE:SPIN, APT:SPIN, VPA:SPIN,
APV:SPIN, VPQ:SPIN, VSQ:SPIN, SRV:SPIN, TQV:SPIN,
APV:KPLS, VPT:KPLS, VPE:KPLS, APT:KPLS, TPT:KPLS,
VPA:KPLS, VPQ:KPLS, VSQ:KPLS, SRV:KPLS, TQV:KPLS,
VPQ:EPLP, VPT:EPLP, VPE:EPLP, APT:EPLP, TPT:EPLP,
VPA:EPLP, APV:EPLP, VSQ:EPLP, SRV:EPLP, TQV:EPLP,
VSQ:EPLT, VPT:EPLT, VPE:EPLT, APT:EPLT, TPT:EPLT,
VPA:EPLT, APV:EPLT, VPQ:EPLT, SRV:EPLT, TQV:EPLT,
VPT:SNIT, VPE:SNIT, APT:SNIT, TPT:SNIT, VPA:SNIT,
APV:SNIT, VPQ:SNIT, VSQ:SNIT, SRV:SNIT, TQV:SNIT,
SRV:RSVK, VPT:RSVK, VPE:RSVK, APT:RSVK, TPT:RSVK,
VPA:RSVK, APV:RSVK, VPQ:RSVK, VSQ:RSVK, TQV:RSVK,
TQV:RPVQ, VPT:RPVQ, VPE:RPVQ, APT:RPVQ, TPT:RPVQ,
VPA:RPVQ, APV:RPVQ, VPQ:RPVQ, VSQ:RPVQ
and
SRV:RPVQ.

[0402] In particular, in certain embodiments, the pair PEP5:PEP1 is selected from the group consisting of

VPTKM:SAIS, VPTKL:SAIS, VPTQL:SAIS, VPTRL:SAIS,
VPTKT:SAIS, VPTAL:SAIS, VPTDL:SAIS, VPEKM:SAIS,
APTKL:SAIS, APTQL:SAIS, TPTKM:SAIS, VPARL:SAIS,
APVKT:SAIS, VPQAL:SAIS, VSQDL:SAIS, VPQDL:SAIS,
SRVHH:SAIS, TQVQL:SAIS, VPEEL:SSLS, VPEKL:SSLS,
VPEQL:SSLS, VPEKM:SSLS, VPERL:SSLS, VPEKT:SSLS,
VPEAL:SSLS, VPEDL:SSLS, VPTEL:SSLS, APTKL:SSLS,
APTQL:SSLS, VPTKL:SSLS, TPTKM:SSLS, VPARL:SSLS,
VPTRLSSLS, APVKT:SSLS, VPQAL:SSLS, VSQDL:SSLS,
VPQDL:SSLS, VPTEE:SSLS, VPTGQSSLS, SRVHH:SSLS,
TQVQL:SSLS, APTEL:NAIS, APTKM:NAIS, APTKL:NAIS,
APTRL:NAIS, APTKT:NAIS, APTAL:NAIS, APTDL:NAIS,
VPTEL:NAIS, VPEKM:NAIS, VPTKL:NAIS, TPTKM:NAIS,
VPARL:NAIS, VPTRL:NAIS, APVKT:NAIS, VPQAL:NAIS,
VSQDL:NAIS, VPQDL:NAIS, VPTEE:NAIS, VPTGQ:NAIS,
SRVHH:NAIS, TQVQL:NAIS, APTEL:SATS, APTKM:SATS,
APTKL:SATS, APTQL:SATS, APTRL:SATS, APTKT:SATS,
APTAL:SATS, APTDL:SATS, VPTEL:SATS, VPEKM:SATS,
VPTKL:SATS, TPTKM:SATS, VPARL:SATS, VPTRL:SATS,
APVKT:SATS, VPQAL:SATS, VSQDL:SATS, VPQDL:SATS,
VPTEE:SATS, VPTGQ:SATS, SRVHH:SATS, TQVQL:SATS,
VPTEL:SPIS, VPTKM:SPIS, VPTKL:SPIS, VPTQL:SPIS,
VPTRL:SPIS, VPTKT:SPIS, VPTAL:SPIS, VPTDL:SPIS,
VPEKM:SPIS, APTKL:SPIS, APTQL:SPIS, TPTKM:SPIS,
VPARL:SPIS, APVKT:SPIS, VPQAL:SPIS, VSQDL:SPIS,
VPQDL:SPIS, SRVHH:SPIS, TQVQL:SPIS, VPTEL:EPIS,
VPTKM:EPIS, VPTKL:EPIS, VPTQL:EPIS, VPTRL:EPIS,
VPTKT:EPIS, VPTAL:EPIS, VPTDL:EPIS, VPEKM:EPIS,
APTKL:EPIS, APTQL:EPIS, TPTKM:EPIS, VPARL:EPIS,
APVKT:EPIS, VPQAL:EPIS, VSQDL:EPIS, VPQDL:EPIS,
SRVHH:EPIS, TQVQL:EPIS, TPTEL:SPIN, TPTKM:SPIN,
TPTKL:SPIN, TPTQL:SPIN, TPTRL:SPIN, TPTKT:SPIN,
TPTAL:SPIN, TPTDL:SPIN, VPTEL:SPIN, VPEKM:SPIN,
APTKL:SPIN, APTQL:SPIN, VPTKL:SPIN, VPARL:SPIN,
VPTRL:SPIN, APVKT:SPIN, VPQAL:SPIN, VSQDL:SPIN,
VPQDL:SPIN, VPTEE:SPIN, VPTGQ:SPIN, SRVHH:SPIN,
TQVQL:SPIN, VPAEL:SPIS, VPAKM:SPIS, VPAKL:SPIS,
VPAQL:SPIS, VPAKT:SPIS, VPAAL:SPIS, VPADL:SPIS,
VPTEE:SPIS, VPTGQ:SPIS, APVEL:KPLS, APVKM:KPLS,
APVKL:KPLS, APVQL:KPLS, APVRL:KPLS, APVAL:KPLS,
APVDL:KPLS, VPTEL:KPLS, VPEKM:KPLS, APTKL:KPLS,
APTQL:KPLS, VPTKL:KPLS, TPTKM:KPLS, VPARL:KPLS,
VPTRL:KPLS, VPQAL:KPLS, VSQDL:KPLS, VPQDL:KPLS,
VPTEE:KPLS, VPTGQ:KPLS, SRVHH:KPLS, TQVQL:KPLS,
VPQEL:EPLP, VPQKM:EPLP, VPQKL:EPLP, VPQQL:EPLP,
VPQRL:EPLP, VPQKT:EPLP, VPQDL:EPLP, VPTEL:EPLP,
VPEKM:EPLP, APTKL:EPLP, APTQL:EPLP, VPTKL:EPLP,
TPTKM:EPLP, VPARL:EPLP, VPTRL:EPLP, APVKT:EPLP,
VSQDL:EPLP, VPTEE:EPLP, VPTGQ:EPLP, SRVHH:EPLP,
TQVQL:EPLP, VSQEL:EPLT, VSQKM:EPLT, VSQKL:EPLT,
VSQQL:EPLT, VSQRL:EPLT, VSQKT:EPLT, VSQAL:EPLT,
VSQDL:EPLT, VPTEL:EPLT, VPEKM:EPLT, APTKL:EPLT,
APTQL:EPLT, VPTKL:EPLT, TPTKM:EPLT, VPARL:EPLT,
VPTRL:EPLT, APVKT:EPLT, VPQAL:EPLT, VPTEE:EPLT,
VPTGQ:EPLT, SRVHH:EPLT, TQVQL:EPLT, VPQEL:EPLT,
VPQKM:EPLT, VPQKL:EPLT, VPQQL:EPLT, VPQRL:EPLT,
VPQKT:EPLT, VPQDL:EPLT, VPTGQ:SNIT, VPEKM:SNIT,
APTKL:SNIT, APTQL:SNIT, TPTKM:SNIT, VPARL:SNIT,
APVKT:SNIT, VPQAL:SNIT, VSQDL:SNIT, VPQDL:SNIT,
SRVHH:SNIT, TQVQL:SNIT, SRVQL:RSVK, VPTEL:RSVK,
VPEKM:RSVK, APTKL:RSVK, APTQL:RSVK, VPTKL:RSVK,
TPTKM:RSVK, VPARL:RSVK, VPTRL:RSVK, APVKT:RSVK,
VPQAL:RSVK, VSQDL:RSVK, VPQDL:RSVK, VPTEE:RSVK,
VPTGQ:RSVK, TQVQL:RSVK, TQVHH:RPVQ, VPTEL:RPVQ,
VPEKM:RPVQ, APTKL:RPVQ, APTQL:RPVQ, VPTKL:RPVQ,
TPTKM:RPVQ, VPARL:RPVQ, VPTRL:RPVQ, APVKT:RPVQ,
VPQAL:RPVQ, VSQDL:RPVQ, VPQDL:RPVQ, VPTEE:RPVQ,
VPTGQ:RPVQ
and
SRVHH:RPVQ.

[0403] In particular, in certain embodiments, the pair PEP7:PEP1 is selected from the group consisting of

GIPEPXX:SAIS, HVTKPTX:SAIS, YVPKPXX:SAIS,
TVPKPXX:SAIS, AVPKAXX:SAIS, KVGKAXX:SAIS,
KASKAXX:SAIS, GSAGPXX:SAIS, AAPASXX:SAIS,
STPPTXX:SAIS, HVPKPXX:SAIS, RVPSTXX:SAIS,
ASAAPXX:SAIS, ASASPXX:SAIS, SSVKXQP:SAIS,
RNVQXRP:SAIS, KIPKAXX:SSLS, SIPKAXX:SSLS,
HVTKPTX:SSLS, YVPKPXX:SSLS, TVPKPXX:SSLS,
AVPKAXX:SSLS, KVGKAXX:SSLS, KASKAXX:SSLS,
GSAGPXX:SSLS, AAPASXX:SSLS, STPPTXX:SSLS,
HVPKPXX:SSLS, RVPSTXX:SSLS, ASAAPXX:SSLS,
ASASPXX:SSLS, NDEGLEX:SSLS, SSVKXQP:SSLS,
RNVQXRP:SSLS, KIPKAXX:NAIS, GIPEPXX:NAIS,
SIPKAXX:NAIS, AVPKAXX:NAIS, KVGKAXX:NAIS,
KASKAXX:NAIS, GSAGPXX:NAIS, AAPASXX:NAIS,
STPPTXX:NAIS, RVPSTXX:NAIS, ASAAPXX:NAIS,
ASASPXX:NAIS, NDEGLEX:NAIS, SSVKXQP:NAIS,
RNVQXRP:NAIS, KIPKAXX:SATS, GIPEPXX:SATS,
SIPKAXX:SATS, HVTKPTX:SATS, YVPKPXX:SATS,
TVPKPXX:SATS, KVGKAXX:SATS, KASKAXX:SATS,
GSAGPXX:SATS, AAPASXX:SATS, STPPTXX:SATS,
HVPKPXX:SATS, RVPSTXX:SATS, ASAAPXX:SATS,
ASASPXX:SATS, NDEGLEX:SATS, SSVKXQP:SATS,
RNVQXRP:SATS, KIPKAXX:SPIS, GIPEPXX:SPIS,
SIPKAXX:SPIS, HVTKPTX:SPIS, YVPKPXX:SPIS,
TVPKPXX:SPIS, AVPKAXX:SPIS, KASKAXX:SPIS,
GSAGPXX:SPIS, AAPASXX:SPIS, STPPTXX:SPIS,
HVPKPXX:SPIS, RVPSTXX:SPIS, ASAAPXX:SPIS,
ASASPXX:SPIS, SSVKXQP:SPIS, RNVQXRP:SPIS,
KIPKAXX:EPIS, GIPEPXX:EPIS, SIPKAXX:EPIS,
HVTKPTX:EPIS, YVPKPXX:EPIS, TVPKPXX:EPIS,
AVPKAXX:EPIS, KVGKAXX:EPIS, GSAGPXX:EPIS,
AAPASXX:EPIS, STPPTXX:EPIS, HVPKPXX:EPIS,
RVPSTXX:EPIS, ASAAPXX:EPIS, ASASPXX:EPIS,
SSVKXQP:EPIS, RNVQXRP:EPIS, KIPKAXX:SPIN,
GIPEPXX:SPIN, SIPKAXX:SPIN, HVTKPTX:SPIN,
YVPKPXX:SPIN, TVPKPXX:SPIN, AVPKAXX:SPIN,
KVGKAXX:SPIN, KASKAXX:SPIN, AAPASXX:SPIN,
STPPTXX:SPIN, HVPKPXX:SPIN, RVPSTXX:SPIN,
ASAAPXX:SPIN, ASASPXX:SPIN, NDEGLEX:SPIN,
SSVKXQP:SPIN, RNVQXRP:SPIN, KVGKAXX:SPIS,
NDEGLEX:SPIS, KIPKAXX:KPLS, GIPEPXX:KPLS,
SIPKAXX:KPLS, HVTKPTX:KPLS, YVPKPXX:KPLS,
TVPKPXX:KPLS, AVPKAXX:KPLS, KVGKAXX:KPLS,
KASKAXX:KPLS, GSAGPXX:KPLS, AAPASXX:KPLS,
STPPTXX:KPLS, HVPKPXX:KPLS, ASAAPXX:KPLS,
ASASPXX:KPLS, NDEGLEX:KPLS, SSVKXQP:KPLS,
RNVQXRP:KPLS, KIPKAXX:EPLP, GIPEPXX:EPLP,
SIPKAXX:EPLP, HVTKPTX:EPLP, YVPKPXX:EPLP,
TVPKPXX:EPLP, AVPKAXX:EPLP, KVGKAXX:EPLP,
KASKAXX:EPLP, GSAGPXX:EPLP, AAPASXX:EPLP,
STPPTXX:EPLP, HVPKPXX:EPLP, RVPSTXX:EPLP,
ASASPXX:EPLP, NDEGLEX:EPLP, SSVKXQP:EPLP,
RNVQXRP:EPLP, KIPKAXX:EPLT, GIPEPXX:EPLT,
SIPKAXX:EPLT, HVTKPTX:EPLT, YVPKPXX:EPLT,
TVPKPXX:EPLT, AVPKAXX:EPLT, KVGKAXX:EPLT,
KASKAXX:EPLT, GSAGPXX:EPLT, AAPASXX:EPLT,
STPPTXX:EPLT, HVPKPXX:EPLT, RVPSTXX:EPLT,
ASAAPXX:EPLT, ASASPXX:EPLT, NDEGLEX:EPLT,
SSVKXQP:EPLT, RNVQXRP:EPLT, NDEGLEX:SNIT,
GIPEPXX:SNIT, HVTKPTX:SNIT, YVPKPXX:SNIT,
TVPKPXX:SNIT, AVPKAXX:SNIT, GSAGPXX:SNIT,
AAPASXX:SNIT, HVPKPXX:SNIT, RVPSTXX:SNIT,
ASAAPXX:SNIT, ASASPXX:SNIT, SSVKXQP:SNIT,
RNVQXRP:SNIT, RNVQXRP:RSVK, KIPKAXX:RSVK,
GIPEPXX:RSVK, SIPKAXX:RSVK, HVTKPTX:RSVK,
YVPKPXX:RSVK, TVPKPXX:RSVK, AVPKAXX:RSVK,
KVGKAXX:RSVK, KASKAXX:RSVK, GSAGPXX:RSVK,
AAPASXX:RSVK, STPPTXX:RSVK, HVPKPXX:RSVK,
RVPSTXX:RSVK, ASAAPXX:RSVK, ASASPXX:RSVK,
NDEGLEX:RSVK, SSVKXQP:RPVQ, KIPKAXX:RPVQ,
GIPEPXX:RPVQ, SIPKAXX:RPVQ, HVTKPTX:RPVQ,
YVPKPXX:RPVQ, TVPKPXX:RPVQ, AVPKAXX:RPVQ,
KVGKAXX:RPVQ, KASKAXX:RPVQ, GSAGPXX:RPVQ,
AAPASXX:RPVQ, STPPTXX:RPVQ, HVPKPXX:RPVQ,
RVPSTXX:RPVQ, ASAAPXX:RPVQ, ASASPXX:RPVQ
and
NDEGLEX:RPVQ.

[0404] In particular, in certain embodiments, the pair PEP9:PEP1 is selected from the group consisting of

GIPEPXXVPTKM:SAIS, HVTKPTXVPTKL:SAIS,
YVPKPXXVPTKL:SAIS, TVPKPXXVPTQL:SAIS,
AVPKAXXVPTKL:SAIS, KVGKAXXVPTKL:SAIS,
KASKAXXVPTKL:SAIS, GSAGPXXVPTKM:SAIS,
AAPASXXVPTRL:SAIS, STPPTXXVPTRL:SAIS,
HVPKPXXVPTKL:SAIS, RVPSTXXVPTKT:SAIS,
ASAAPXXVPTAL:SAIS, ASASPXXVPTDL:SAIS,
GIPEPXXVPEKM:SAIS, HVTKPTXAPTKL:SAIS,
YVPKPXXAPTKL:SAIS, TVPKPXXAPTQL:SAIS,
AVPKAXXAPTKL:SAIS, GSAGPXXTPTKM:SAIS,
AAPASXXVPARL:SAIS, HVPKPXXAPTKL:SAIS,
RVPSTXXAPVKT:SAIS, ASAAPXXVPQAL:SAIS,
ASASPXXVSQDL:SAIS, ASASPXXVPQDL:SAIS,
SSVKXQPSRVHH:SAIS, RNVQXRPTQVQL:SAIS,
KIPKAXXVPEEL:SSLS, SIPKAXXVPEEL:SSLS,
HVTKPTXVPEKL:SSLS, YVPKPXXVPEKL:SSLS,
TVPKPXXVPEQL:SSLS, AVPKAXXVPEKL:SSLS,
KVGKAXXVPEKL:SSLS, KASKAXXVPEKL:SSLS,
GSAGPXXVPEKM:SSLS, AAPASXXVPERL:SSLS,
STPPTXXVPERL:SSLS, HVPKPXXVPEKL:SSLS,
RVPSTXXVPEKT:SSLS, ASAAPXXVPEAL:SSLS,
ASASPXXVPEDL:SSLS, KIPKAXXVPTEL:SSLS,
SIPKAXXVPTEL:SSLS, HVTKPTXAPTKL:SSLS,
YVPKPXXAPTKL:SSLS, TVPKPXXAPTQL:SSLS,
AVPKAXXAPTKL:SSLS, KVGKAXXVPTKL:SSLS,
KASKAXXVPTKL:SSLS, GSAGPXXTPTKM:SSLS,
AAPASXXVPARL:SSLS, STPPTXXVPTRL:SSLS,
HVPKPXXAPTKL:SSLS, RVPSTXXAPVKT:SSLS,
ASAAPXXVPQAL:SSLS, ASASPXXVSQDL:SSLS,
ASASPXXVPQDL:SSLS, NDEGLEXVPTEE:SSLS,
NDEGLEXVPTGQ:SSLS, SSVKXQPSRVHH:SSLS,
RNVQXRPTQVQL:SSLS, KIPKAXXAPTEL:NAIS,
GIPEPXXAPTKM:NAIS, SIPKAXXAPTEL:NAIS,
AVPKAXXAPTKL:NAIS, KVGKAXXAPTKL:NAIS,
KASKAXXAPTKL:NAIS, GSAGPXXAPTKM:NAIS,
AAPASXXAPTRL:NAIS, STPPTXXAPTRL:NAIS,
RVPSTXXAPTKT:NAIS, ASAAPXXAPTAL:NAIS,
ASASPXXAPTDL:NAIS, KIPKAXXVPTEL:NAIS,
GIPEPXXVPEKM:NAIS, SIPKAXXVPTEL:NAIS,
KVGKAXXVPTKL:NAIS, KASKAXXVPTKL:NAIS,
GSAGPXXTPTKM:NAIS, AAPASXXVPARL:NAIS,
STPPTXXVPTRL:NAIS, RVPSTXXAPVKT:NAIS,
ASAAPXXVPQAL:NAIS, ASASPXXVSQDL:NAIS,
ASASPXXVPQDL:NAIS, NDEGLEXVPTEE:NAIS,
NDEGLEXVPTGQ:NAIS, SSVKXQPSRVHH:NAIS,
RNVQXRPTQVQL:NAIS, KIPKAXXAPTEL:SATS,
GIPEPXXAPTKM:SATS, SIPKAXXAPTEL:SATS,
HVTKPTXAPTKL:SATS, YVPKPXXAPTKL:SATS,
TVPKPXXAPTQL:SATS, KVGKAXXAPTKL:SATS,
KASKAXXAPTKL:SATS, GSAGPXXAPTKM:SATS,
AAPASXXAPTRL:SATS, STPPTXXAPTRL:SATS,
HVPKPXXAPTKL:SATS, RVPSTXXAPTKT:SATS,
ASAAPXXAPTAL:SATS, ASASPXXAPTDL:SATS,
KIPKAXXVPTEL:SATS, GIPEPXXVPEKM:SATS,
SIPKAXXVPTEL:SATS, KVGKAXXVPTKL:SATS,
KASKAXXVPTKL:SATS, GSAGPXXTPTKM:SATS,
AAPASXXVPARL:SATS, STPPTXXVPTRL:SATS,
RVPSTXXAPVKT:SATS, ASAAPXXVPQAL:SATS,
ASASPXXVSQDL:SATS, ASASPXXVPQDL:SATS,
NDEGLEXVPTEE:SATS, NDEGLEXVPTGQ:SATS,
SSVKXQPSRVHH:SATS, RNVQXRPTQVQL:SATS,
KIPKAXXVPTEL:SPIS, GIPEPXXVPTKM:SPIS,
SIPKAXXVPTEL:SPIS, HVTKPTXVPTKL:SPIS,
YVPKPXXVPTKL:SPIS, TVPKPXXVPTQL:SPIS,
AVPKAXXVPTKL:SPIS, KASKAXXVPTKL:SPIS,
GSAGPXXVPTKM:SPIS, AAPASXXVPTRL:SPIS,
STPPTXXVPTRL:SPIS, HVPKPXXVPTKL:SPIS,
RVPSTXXVPTKT:SPIS, ASAAPXXVPTAL:SPIS,
ASASPXXVPTDL:SPIS, GIPEPXXVPEKM:SPIS,
HVTKPTXAPTKL:SPIS, YVPKPXXAPTKL:SPIS,
TVPKPXXAPTQL:SPIS, AVPKAXXAPTKL:SPIS,
GSAGPXXTPTKM:SPIS, AAPASXXVPARL:SPIS,
HVPKPXXAPTKL:SPIS, RVPSTXXAPVKT:SPIS,
ASAAPXXVPQAL:SPIS, ASASPXXVSQDL:SPIS,
ASASPXXVPQDL:SPIS, SSVKXQPSRVHH:SPIS,
RNVQXRPTQVQL:SPIS, KIPKAXXVPTEL:EPIS,
GIPEPXXVPTKM:EPIS, SIPKAXXVPTEL:EPIS,
HVTKPTXVPTKL:EPIS, YVPKPXXVPTKL:EPIS,
TVPKPXXVPTQL:EPIS, AVPKAXXVPTKL:EPIS,
KVGKAXXVPTKL:EPIS, GSAGPXXVPTKM:EPIS,
AAPASXXVPTRL:EPIS, STPPTXXVPTRL:EPIS,
HVPKPXXVPTKL:EPIS, RVPSTXXVPTKT:EPIS,
ASAAPXXVPTAL:EPIS, ASASPXXVPTDL:EPIS,
GIPEPXXVPEKM:EPIS, HVTKPTXAPTKL:EPIS,
YVPKPXXAPTKL:EPIS, TVPKPXXAPTQL:EPIS,
AVPKAXXAPTKL:EPIS, GSAGPXXTPTKM:EPIS,
AAPASXXVPARL:EPIS, HVPKPXXAPTKL:EPIS,
RVPSTXXAPVKT:EPIS, ASAAPXXVPQAL:EPIS,
ASASPXXVSQDL:EPIS, ASASPXXVPQDL:EPIS,
SSVKXQPSRVHH:EPIS, RNVQXRPTQVQL:EPIS,
KIPKAXXTPTEL:SPIN, GIPEPXXTPTKM:SPIN,
SIPKAXXTPTEL:SPIN, HVTKPTXTPTKL:SPIN,
YVPKPXXTPTKL:SPIN, TVPKPXXTPTQL:SPIN,
AVPKAXXTPTKL:SPIN, KVGKAXXTPTKL:SPIN,
KASKAXXTPTKL:SPIN, AAPASXXTPTRL:SPIN,
STPPTXXTPTRL:SPIN, HVPKPXXTPTKL:SPIN,
RVPSTXXTPTKT:SPIN, ASAAPXXTPTAL:SPIN,
ASASPXXTPTDL:SPIN, KIPKAXXVPTEL:SPIN,
GIPEPXXVPEKM:SPIN, SIPKAXXVPTEL:SPIN,
HVTKPTXAPTKL:SPIN, YVPKPXXAPTKL:SPIN,
TVPKPXXAPTQL:SPIN, AVPKAXXAPTKL:SPIN,
KVGKAXXVPTKL:SPIN, KASKAXXVPTKL:SPIN,
AAPASXXVPARL:SPIN, STPPTXXVPTRL:SPIN,
HVPKPXXAPTKL:SPIN, RVPSTXXAPVKT:SPIN,
ASAAPXXVPQAL:SPIN, ASASPXXVSQDL:SPIN,
ASASPXXVPQDL:SPIN, NDEGLEXVPTEE:SPIN,
NDEGLEXVPTGQ:SPIN, SSVKXQPSRVHH:SPIN,
RNVQXRPTQVQL:SPIN, KIPKAXXVPAEL:SPIS,
GIPEPXXVPAKM:SPIS, SIPKAXXVPAEL:SPIS,
HVTKPTXVPAKL:SPIS, YVPKPXXVPAKL:SPIS,
TVPKPXXVPAQL:SPIS, AVPKAXXVPAKL:SPIS,
KVGKAXXVPAKL:SPIS, KASKAXXVPAKL:SPIS,
GSAGPXXVPAKM:SPIS, STPPTXXVPARL:SPIS,
HVPKPXXVPAKL:SPIS, RVPSTXXVPAKT:SPIS,
ASAAPXXVPAAL:SPIS, ASASPXXVPADL:SPIS,
KVGKAXXVPTKL:SPIS, NDEGLEXVPTEE:SPIS,
NDEGLEXVPTGQ:SPIS, KIPKAXXAPVEL:KPLS,
GIPEPXXAPVKM:KPLS, SIPKAXXAPVEL:KPLS,
HVTKPTXAPVKL:KPLS, YVPKPXXAPVKL:KPLS,
TVPKPXXAPVQL:KPLS, AVPKAXXAPVKL:KPLS,
KVGKAXXAPVKL:KPLS, KASKAXXAPVKL:KPLS,
GSAGPXXAPVKM:KPLS, AAPASXXAPVRL:KPLS,
STPPTXXAPVRL:KPLS, HVPKPXXAPVKL:KPLS,
ASAAPXXAPVAL:KPLS, ASASPXXAPVDL:KPLS,
KIPKAXXVPTEL:KPLS, GIPEPXXVPEKM:KPLS,
SIPKAXXVPTEL:KPLS, HVTKPTXAPTKL:KPLS,
YVPKPXXAPTKL:KPLS, TVPKPXXAPTQL:KPLS,
AVPKAXXAPTKL:KPLS, KVGKAXXVPTKL:KPLS,
KASKAXXVPTKL:KPLS, GSAGPXXTPTKM:KPLS,
AAPASXXVPARL:KPLS, STPPTXXVPTRL:KPLS,
HVPKPXXAPTKL:KPLS, ASAAPXXVPQAL:KPLS,
ASASPXXVSQDL:KPLS, ASASPXXVPQDL:KPLS,
NDEGLEXVPTEE:KPLS, NDEGLEXVPTGQ:KPLS,
SSVKXQPSRVHH:KPLS, RNVQXRPTQVQL:KPLS,
KIPKAXXVPQEL:EPLP, GIPEPXXVPQKM:EPLP,
SIPKAXXVPQEL:EPLP, HVTKPTXVPQKL:EPLP,
YVPKPXXVPQKL:EPLP, TVPKPXXVPQQL:EPLP,
AVPKAXXVPQKL:EPLP, KVGKAXXVPQKL:EPLP,
KASKAXXVPQKL:EPLP, GSAGPXXVPQKM:EPLP,
AAPASXXVPQRL:EPLP, STPPTXXVPQRL:EPLP,
HVPKPXXVPQKL:EPLP, RVPSTXXVPQKT:EPLP,
ASASPXXVPQDL:EPLP, KIPKAXXVPTEL:EPLP,
GIPEPXXVPEKM:EPLP, SIPKAXXVPTEL:EPLP,
HVTKPTXAPTKL:EPLP, YVPKPXXAPTKL:EPLP,
TVPKPXXAPTQL:EPLP, AVPKAXXAPTKL:EPLP,
KVGKAXXVPTKL:EPLP, KASKAXXVPTKL:EPLP,
GSAGPXXTPTKM:EPLP, AAPASXXVPARL:EPLP,
STPPTXXVPTRL:EPLP, HVPKPXXAPTKL:EPLP,
RVPSTXXAPVKT:EPLP, ASASPXXVSQDL:EPLP,
NDEGLEXVPTEE:EPLP, NDEGLEXVPTGQ:EPLP,
SSVKXQPSRVHH:EPLP, RNVQXRPTQVQL:EPLP,
KIPKAXXVSQEL:EPLT, GIPEPXXVSQKM:EPLT,
SIPKAXXVSQEL:EPLT, HVTKPTXVSQKL:EPLT,
YVPKPXXVSQKL:EPLT, TVPKPXXVSQQL:EPLT,
AVPKAXXVSQKL:EPLT, KVGKAXXVSQKL:EPLT,
KASKAXXVSQKL:EPLT, GSAGPXXVSQKM:EPLT,
AAPASXXVSQRL:EPLT, STPPTXXVSQRL:EPLT,
HVPKPXXVSQKL:EPLT, RVPSTXXVSQKT:EPLT,
ASAAPXXVSQAL:EPLT, ASASPXXVSQDL:EPLT,
KIPKAXXVPTEL:EPLT, GIPEPXXVPEKM:EPLT,
SIPKAXXVPTEL:EPLT, HVTKPTXAPTKL:EPLT,
YVPKPXXAPTKL:EPLT, TVPKPXXAPTQL:EPLT,
AVPKAXXAPTKL:EPLT, KVGKAXXVPTKL:EPLT,
KASKAXXVPTKL:EPLT, GSAGPXXTPTKM:EPLT,
AAPASXXVPARL:EPLT, STPPTXXVPTRL:EPLT,
HVPKPXXAPTKL:EPLT, RVPSTXXAPVKT:EPLT,
ASAAPXXVPQAL:EPLT, NDEGLEXVPTEE:EPLT,
NDEGLEXVPTGQ:EPLT, SSVKXQPSRVHH:EPLT,
RNVQXRPTQVQL:EPLT, KIPKAXXVPQEL:EPLT,
GIPEPXXVPQKM:EPLT, SIPKAXXVPQEL:EPLT,
HVTKPTXVPQKL:EPLT, YVPKPXXVPQKL:EPLT,
TVPKPXXVPQQL:EPLT, AVPKAXXVPQKL:EPLT,
KVGKAXXVPQKL:EPLT, KASKAXXVPQKL:EPLT,
GSAGPXXVPQKM:EPLT, AAPASXXVPQRL:EPLT,
STPPTXXVPQRL:EPLT, HVPKPXXVPQKL:EPLT,
RVPSTXXVPQKT:EPLT, ASASPXXVPQDL:EPLT,
NDEGLEXVPTGQ:SNIT, GIPEPXXVPEKM:SNIT,
HVTKPTXAPTKL:SNIT, YVPKPXXAPTKL:SNIT,
TVPKPXXAPTQL:SNIT, AVPKAXXAPTKL:SNIT,
GSAGPXXTPTKM:SNIT, AAPASXXVPARL:SNIT,
HVPKPXXAPTKL:SNIT, RVPSTXXAPVKT:SNIT,
ASAAPXXVPQAL:SNIT, ASASPXXVSQDL:SNIT,
ASASPXXVPQDL:SNIT, SSVKXQPSRVHH:SNIT,
RNVQXRPTQVQL:SNIT, RNVQXRPSRVQL:RSVK,
KIPKAXXVPTEL:RSVK, GIPEPXXVPEKM:RSVK,
SIPKAXXVPTEL:RSVK, HVTKPTXAPTKL:RSVK,
YVPKPXXAPTKL:RSVK, TVPKPXXAPTQL:RSVK,
AVPKAXXAPTKL:RSVK, KVGKAXXVPTKL:RSVK,
KASKAXXVPTKL:RSVK, GSAGPXXTPTKM:RSVK,
AAPASXXVPARL:RSVK, STPPTXXVPTRL:RSVK,
HVPKPXXAPTKL:RSVK, RVPSTXXAPVKT:RSVK,
ASAAPXXVPQAL:RSVK, ASASPXXVSQDL:RSVK,
ASASPXXVPQDL:RSVK, NDEGLEXVPTEE:RSVK,
NDEGLEXVPTGQ:RSVK, RNVQXRPTQVQL:RSVK,
SSVKXQPTQVHH:RPVQ, KIPKAXXVPTEL:RPVQ,
GIPEPXXVPEKM:RPVQ, SIPKAXXVPTEL:RPVQ,
HVTKPTXAPTKL:RPVQ, YVPKPXXAPTKL:RPVQ,
TVPKPXXAPTQL:RPVQ, AVPKAXXAPTKL:RPVQ,
KVGKAXXVPTKL:RPVQ, KASKAXXVPTKL:RPVQ,
GSAGPXXTPTKM:RPVQ, AAPASXXVPARL:RPVQ,
STPPTXXVPTRL:RPVQ, HVPKPXXAPTKL:RPVQ,
RVPSTXXAPVKT:RPVQ, ASAAPXXVPQAL:RPVQ,
ASASPXXVSQDL:RPVQ, ASASPXXVPQDL:RPVQ,
NDEGLEXVPTEE:RPVQ, NDEGLEXVPTGQ:RPVQ
and
SSVKXQPSRVHH:RPVQ.

[0405] In particular, in certain embodiments, the pair PEP3:PEP12 is selected from the group consisting of VPT:SAIS-AA¹⁷-LYL, VPE:SAIS-AA¹⁷-LYL, APT:SAIS-AA¹⁷-LYL, TPT:SAIS-AA¹⁷-LYL, VPA:SAIS-AA¹⁷-LYL, APV:SAIS-AA¹⁷-LYL, VPQ:SAIS-AA¹⁷-LYL, VSQ:SAIS-AA¹⁷-LYL, SRV:SAIS-AA¹⁷-LYL, TQV:SAIS-AA¹⁷-LYL, VPE:SSLS-AA¹⁷-LFF, VPT:SSLS-AA¹⁷-LFF, APT:SSLS-AA¹⁷-LFF, TPT:SSLS-AA¹⁷-LFF, VPA:SSLS-AA¹⁷-LFF, APV:SSLS-AA¹⁷-LFF, VPQ:SSLS-AA¹⁷-LFF, VSQ:SSLS-AA¹⁷-LFF, SRV:SSLS-AA¹⁷-LFF, TQV:SSLS-AA¹⁷-LFF, APT:NAIS-AA¹⁷-LYF, VPT:NAIS-AA¹⁷-LYF, VPE:NAIS-AA¹⁷-LYF, TPT:NAIS-AA¹⁷-LYF, VPA:NAIS-AA¹⁷-LYF, APV:NAIS-AA¹⁷-LYF, VPQ:NAIS-AA¹⁷-LYF, VSQ:NAIS-AA¹⁷-LYF, SRV:NAIS-AA¹⁷-LYF, TQV:NAIS-AA¹⁷-LYF, APT:SATS-AA¹⁷-LYY, VPT:SATS-AA¹⁷-LYY, VPE:SATS-AA¹⁷-LYY, TPT:SATS-AA¹⁷-LYY, VPA:SATS-AA¹⁷-LYY, APV:SATS-AA¹⁷-LYY, VPQ:SATS-AA¹⁷-LYY, VSQ:SATS-AA¹⁷-LYY, SRV:SATS-AA¹⁷-LYY, TQV:SATS-AA¹⁷-LYY, VPT:SPIS-AA¹⁷-LYK, VPE:SPIS-AA¹⁷-LYK, APT:SPIS-AA¹⁷-LYK, TPT:SPIS-AA¹⁷-LYK, VPA:SPIS-AA¹⁷-LYK, APV:SPIS-AA¹⁷-LYK, VPQ:SPIS-AA¹⁷-LYK, VSQ:SPIS-AA¹⁷-LYK, SRV:SPIS-AA¹⁷-LYK, TQV:SPIS-AA¹⁷-LYK, VPT:EPIS-AA¹⁷-LYL, VPE:EPIS-AA¹⁷-LYL, APT:EPIS-AA¹⁷-LYL, TPT:EPIS-AA¹⁷-LYL, VPA:EPIS-AA¹⁷-LYL, APV:EPIS-AA¹⁷-LYL, VPQ:EPIS-AA¹⁷-LYL, VSQ:EPIS-AA¹⁷-LYL, SRV:EPIS-AA¹⁷-LYL, TQV:EPIS-AA¹⁷-LYL, TPT:SPIN-AA¹⁷-LYF, VPT:SPIN-AA¹⁷-LYF, VPE:SPIN-AA¹⁷-LYF, APT:SPIN-AA¹⁷-LYF, VPA:SPIN-AA¹⁷-LYF, APV:SPIN-AA¹⁷-LYF, VPQ:SPIN-AA¹⁷-LYF, VSQ:SPIN-AA¹⁷-LYF, SRV:SPIN-AA¹⁷-LYF, TQV:SPIN-AA¹⁷-LYF, VPA:SPIS-AA¹⁷-LYI, VPT:SPIS-AA¹⁷-LYI, VPE:SPIS-AA¹⁷-LYI, APT:SPIS-AA¹⁷-LYI, TPT:SPIS-AA¹⁷-LYI, APV:SPIS-AA¹⁷-LYI, VPQ:SPIS-AA¹⁷-LYI, VSQ:SPIS-AA¹⁷-LYI, SRV:SPIS-AA¹⁷-LYI, TQV:SPIS-AA¹⁷-LYI, VPT:SPIS-AA¹⁷-LFI, VPE:SPIS-AA¹⁷-LFI, APT:SPIS-AA¹⁷-LFI, TPT:SPIS-AA¹⁷-LFI, VPA:SPIS-AA¹⁷-LFI, APV:SPIS-AA¹⁷-LFI, VPQ:SPIS-AA¹⁷-LFI, VSQ:SPIS-AA¹⁷-LFI, SRV:SPIS-AA¹⁷-LFI, TQV:SPIS-AA¹⁷-LFI, APV:KPLS-AA¹⁷-LYV, VPT:KPLS-AA¹⁷-LYV, VPE:KPLS-AA¹⁷-LYV, APT:KPLS-AA¹⁷-LYV, TPT:KPLS-AA¹⁷-LYV, VPA:KPLS-AA¹⁷-LYV, VPQ:KPLS-AA¹⁷-LYV, VSQ:KPLS-AA¹⁷-LYV, SRV:KPLS-AA¹⁷-LYV, TQV:KPLS-AA¹⁷-LYV, VPQ:EPLP-AA¹⁷-VYY, VPT:EPLP-AA¹⁷-VYY, VPE:EPLP-AA¹⁷-VYY, APT:EPLP-AA¹⁷-VYY, TPT:EPLP-AA¹⁷-VYY, VPA:EPLP-AA¹⁷-VYY, APV:EPLP-AA¹⁷-VYY, VSQ:EPLP-AA¹⁷-VYY, SRV:EPLP-AA¹⁷-VYY, TQV:EPLP-AA¹⁷-VYY, VSQ:EPLT-AA¹⁷-LYY, VPT:EPLT-AA¹⁷-LYY, VPE:EPLT-AA¹⁷-LYY, APT:EPLT-AA¹⁷-LYY, TPT:EPLT-AA¹⁷-LYY, VPA:EPLT-AA¹⁷-LYY, APV:EPLT-AA¹⁷-LYY, VPQ:EPLT-AA¹⁷-LYY, SRV:EPLT-AA¹⁷-LYY, TQV:EPLT-AA¹⁷-LYY, VPT:SNIT-AA¹⁷-QIM, VPE:SNIT-AA¹⁷-QIM, APT:SNIT-AA¹⁷-QIM, TPT:SNIT-AA¹⁷-QIM, VPA:SNIT-AA¹⁷-QIM, APV:SNIT-AA¹⁷-QIM, VPQ:SNIT-AA¹⁷-QIM, VSQ:SNIT-AA¹⁷-QIM, SRV:SNIT-AA¹⁷-QIM, TQV:SNIT-AA¹⁷-QIM, SRV:RSVK-AA¹⁷-AKV, VPT:RSVK-AA¹⁷-AKV, VPE:RSVK-AA¹⁷-AKV, APT:RSVK-AA¹⁷-AKV, TPT:RSVK-AA¹⁷-AKV, VPA:RSVK-AA¹⁷-AKV, APV:RSVK-AA¹⁷-AKV, VPQ:RSVK-AA¹⁷-AKV, VSQ:RSVK-AA¹⁷-AKV, TQV:RSVK-AA¹⁷-AKV, TQV:RPVQ-AA¹⁷-RKI, VPT:RPVQ-AA¹⁷-RKI, VPE:RPVQ-AA¹⁷-RKI, APT:RPVQ-AA¹⁷-RKI, TPT:RPVQ-AA¹⁷-RKI, VPA:RPVQ-AA¹⁷-RKI, APV:RPVQ-AA¹⁷-RKI, VPQ:RPVQ-AA¹⁷-RKI, VSQ:RPVQ-AA¹⁷-RKI and SRV:RPVQ-AA¹⁷-RKI; and wherein AA¹⁷ is selected from the group consisting of G, A, V, L, I, P, F, M, W, T and S (in particular is selected from the group consisting of M, I, L, V and T).

[0406] In particular, in certain embodiments, the pair PEP12:PEP5 is selected from the group consisting of VPTKM:SAIS-AA¹⁷-LYL, VPTKL:SAIS-AA¹⁷-LYL, VPTQL:SAIS-AA¹⁷-LYL, VPTRL:SAIS-AA¹⁷-LYL, VPTKT:SAIS-AA¹⁷-LYL, VPTAL:SAIS-AA¹⁷-LYL, VPTDL:SAIS-AA¹⁷-LYL, VPEKM:SAIS-AA¹⁷-LYL, APTKL:SAIS-AA¹⁷-LYL, APTQL:SAIS-AA¹⁷-LYL, TPTKM:SAIS-AA¹⁷-LYL, VPARL:SAIS-AA¹⁷-LYL, APVKT:SAIS-AA¹⁷-LYL, VPQAL:SAIS-AA¹⁷-LYL, VSQDL:SAIS-AA¹⁷-LYL, VPQDL:SAIS-AA¹⁷-LYL, SRVHH:SAIS-AA¹⁷-LYL, TQVQL:SAIS-AA¹⁷-LYL, VPEEL:SSLS-AA¹⁷-LFF, VPEKL:SSLS-AA¹⁷-LFF, VPEQL:SSLS-AA¹⁷-LFF, VPEKM:SSLS-AA¹⁷-LFF, VPERL:SSLS-AA¹⁷-LFF, VPEKT:SSLS-AA¹⁷-LFF, VPEAL:SSLS-AA¹⁷-LFF, VPEDL:SSLS-AA¹⁷-LFF, VPTEL:SSLS-AA¹⁷-LFF, APTKL:SSLS-AA¹⁷-LFF, APTQL:SSLS-AA¹⁷-LFF, VPTKL:SSLS-AA¹⁷-LFF, TPTKM:SSLS-AA¹⁷-LFF, VPARL:SSLS-AA¹⁷-LFF, VPTRL:SSLS-AA¹⁷-LFF, APVKT:SSLS-AA¹⁷-LFF, VPQAL:SSLS-AA¹⁷-LFF, VSQDL:SSLS-AA¹⁷-LFF, VPQDL:SSLS-AA¹⁷-LFF, VPTEE:SSLS-AA¹⁷-LFF, VPTGQ:SSLS-AA¹⁷-LFF, SRVHH:SSLS-AA¹⁷-LFF, TQVQL:SSLS-AA¹⁷-LFF, APTEL:NAIS-AA¹⁷-LYF, APTKM:NAIS-AA¹⁷-LYF, APTKL:NAIS-AA¹⁷-LYF, APTRL:NAIS-AA¹⁷-LYF, APTKT:NAIS-AA¹⁷-LYF, APTAL:NAIS-AA¹⁷-LYF, APTDL:NAIS-AA¹⁷-LYF, VPTEL:NAIS-AA¹⁷-LYF, VPEKM:NAIS-AA¹⁷-LYF, VPTKL:NAIS-AA¹⁷-LYF, TPTKM:NAIS-AA¹⁷-LYF, VPARL:NAIS-AA¹⁷-LYF, VPTRL:NAIS-AA¹⁷-LYF, APVKT:NAIS-AA¹⁷-LYF, VPQAL:NAIS-AA¹⁷-LYF, VSQDL:NAIS-AA¹⁷-LYF, VPQDL:NAIS-AA¹⁷-LYF, VPTEE:NAIS-AA¹⁷-LYF, VPTGQ:NAIS-AA¹⁷-LYF, SRVHH:NAIS-AA¹⁷-LYF, TQVQL:NAIS-AA¹⁷-LYF, APTEL:SATS-AA¹⁷-LYY, APTKM:SATS-AA¹⁷-LYY, APTKL:SATS-AA¹⁷-LYY, APTQL:SATS-AA¹⁷-LYY, APTRL:SATS-AA¹⁷-LYY, APTKT:SATS-AA¹⁷-LYY, APTAL:SATS-AA¹⁷-LYY, APTDL:SATS-AA¹⁷-LYY, VPTEL:SATS-AA¹⁷-LYY, VPEKM:SATS-AA¹⁷-LYY, VPTKL:SATS-AA¹⁷-LYY, TPTKM:SATS-AA¹⁷-LYY, VPARL:SATS-AA¹⁷-LYY, VPTRL:SATS-AA¹⁷-LYY, APVKT:SATS-AA¹⁷-LYY, VPQAL:SATS-AA¹⁷-LYY, VSQDL:SATS-AA¹⁷-LYY, VPQDL:SATS-AA¹⁷-LYY, VPTEE:SATS-AA¹⁷-LYY, VPTGQ:SATS-AA¹⁷-LYY, SRVHH:SATS-AA¹⁷-LYY, TQVQL:SATS-AA¹⁷-LYY, VPTEL:SPIS-AA¹⁷-LYK, VPTKM:SPIS-AA¹⁷-LYK, VPTKL:SPIS-AA¹⁷-LYK, VPTQL:SPIS-AA¹⁷-LYK, VPTRL:SPIS-AA¹⁷-LYK, VPTKT:SPIS-AA¹⁷-LYK, VPTAL:SPIS-AA¹⁷-LYK, VPTDL:SPIS-AA¹⁷-LYK, VPEKM:SPIS-AA¹⁷-LYK, APTKL:SPIS-AA¹⁷-LYK, APTQL:SPIS-AA¹⁷-LYK, TPTKM:SPIS-AA¹⁷-LYK, VPARL:SPIS-AA¹⁷-LYK, APVKT:SPIS-AA¹⁷-LYK, VPQAL:SPIS-AA¹⁷-LYK, VSQDL:SPIS-AA¹⁷-LYK, VPQDL:SPIS-AA¹⁷-LYK, SRVHH:SPIS-AA¹⁷-LYK, TQVQL:SPIS-AA¹⁷-LYK, VPTEL:EPIS-AA¹⁷-LYL, VPTKM:EPIS-AA¹⁷-LYL, VPTKL:EPIS-AA¹⁷-LYL, VPTQL:EPIS-AA¹⁷-LYL, VPTRL:EPIS-AA¹⁷-LYL, VPTKT:EPIS-AA¹⁷-LYL, VPTAL:EPIS-AA¹⁷-LYL, VPTDL:EPIS-AA¹⁷-LYL, VPEKM:EPIS-AA¹⁷-LYL, APTKL:EPIS-AA¹⁷-LYL, APTQL:EPIS-AA¹⁷-LYL, TPTKM:EPIS-AA¹⁷-LYL, VPARL:EPIS-AA¹⁷-LYL, APVKT:EPIS-AA¹⁷-LYL, VPQAL:EPIS-AA¹⁷-LYL, VSQDL:EPIS-AA¹⁷-LYL, VPQDL:EPIS-AA¹⁷-LYL, SRVHH:EPIS-AA¹⁷-LYL, TQVQL:EPIS-AA¹⁷-LYL, TPTEL:SPIN-AA¹⁷-LYF, TPTKM:SPIN-AA¹⁷-LYF, TPTKL:SPIN-AA¹⁷-LYF, TPTQL:SPIN-AA¹⁷-LYF, TPTRL:SPIN-AA¹⁷-LYF, TPTKT:SPIN-AA¹⁷-LYF, TPTAL:SPIN-AA¹⁷-LYF, TPTDL:SPIN-AA¹⁷-LYF, VPTEL:SPIN-AA¹⁷-LYF, VPEKM:SPIN-AA¹⁷-LYF, APTKL:SPIN-AA¹⁷-LYF, APTQL:SPIN-AA¹⁷-LYF, VPTKL:SPIN-AA¹⁷-LYF, VPARL:SPIN-AA¹⁷-LYF, VPTRL:SPIN-AA¹⁷-LYF, APVKT:SPIN-AA¹⁷-LYF, VPQAL:SPIN-AA¹⁷-LYF, VSQDL:SPIN-AA¹⁷-LYF, VPQDL:SPIN-AA¹⁷-LYF, VPTEE:SPIN-AA¹⁷-LYF, VPTGQ:SPIN-AA¹⁷-LYF, SRVHH:SPIN-AA¹⁷-LYF, TQVQL:SPIN-AA¹⁷-LYF, VPAEL:SPIS-AA¹⁷-LYI, VPAKM:SPIS-AA¹⁷-LYI, VPAKL:SPIS-AA¹⁷-LYI, VPAQL:SPIS-AA¹⁷-LYI, VPARL:SPIS-AA¹⁷-LYI, VPAKT:SPIS-AA¹⁷-LYI, VPAAL:SPIS-AA¹⁷-LYI, VPADL:SPIS-AA¹⁷-LYI, VPTEL:SPIS-AA¹⁷-LYI, VPEKM:SPIS-AA¹⁷-LYI, APTKL:SPIS-AA¹⁷-LYI, APTQL:SPIS-AA¹⁷-LYI, VPTKL:SPIS-AA¹⁷-LYI, TPTKM:SPIS-AA¹⁷-LYI, VPTRL:SPIS-AA¹⁷-LYI, APVKT:SPIS-AA¹⁷-LYI, VPQAL:SPIS-AA¹⁷-LYI, VSQDL:SPIS-AA¹⁷-LYI, VPQDL:SPIS-AA¹⁷-LYI, VPTEE:SPIS-AA¹⁷-LYI, VPTGQ:SPIS-AA¹⁷-LYI, SRVHH:SPIS-AA¹⁷-LYI, TQVQL:SPIS-AA¹⁷-LYI, VPTEL:SPIS-AA¹⁷-LFI, VPTKM:SPIS-AA¹⁷-LFI, VPTKL:SPIS-AA¹⁷-LFI, VPTQL:SPIS-AA¹⁷-LFI, VPTRL:SPIS-AA¹⁷-LFI, VPTKT:SPIS-AA¹⁷-LFI, VPTAL:SPIS-AA¹⁷-LFI, VPTDL:SPIS-AA¹⁷-LFI, VPEKM:SPIS-AA¹⁷-LFI, APTKL:SPIS-AA¹⁷-LFI, APTQL:SPIS-AA¹⁷-LFI, TPTKM:SPIS-AA¹⁷-LFI, VPARL:SPIS-AA¹⁷-LFI, APVKT:SPIS-AA¹⁷-LFI, VPQAL:SPIS-AA¹⁷-LFI, VSQDL:SPIS-AA¹⁷-LFI, VPQDL:SPIS-AA¹⁷-LFI, SRVHH:SPIS-AA¹⁷-LFI, TQVQL:SPIS-AA¹⁷-LFI, APVEL:KPLS-AA¹⁷-LYV, APVKM:KPLS-AA¹⁷-LYV, APVKL:KPLS-AA¹⁷-LYV, APVQL:KPLS-AA¹⁷-LYV, APVRL:KPLS-AA¹⁷-LYV, APVAL:KPLS-AA¹⁷-LYV, APVDL:KPLS-AA¹⁷-LYV, VPTEL:KPLS-AA¹⁷-LYV, VPEKM:KPLS-AA¹⁷-LYV, APTKL:KPLS-AA¹⁷-LYV, APTQL:KPLS-AA¹⁷-LYV, VPTKL:KPLS-AA¹⁷-LYV, TPTKM:KPLS-AA¹⁷-LYV, VPARL:KPLS-AA¹⁷-LYV, VPTRL:KPLS-AA¹⁷-LYV, VPQAL:KPLS-AA¹⁷-LYV, VSQDL:KPLS-AA¹⁷-LYV, VPQDL:KPLS-AA¹⁷-LYV, VPTEE:KPLS-AA¹⁷-LYV, VPTGQ:KPLS-AA¹⁷-LYV, SRVHH:KPLS-AA¹⁷-LYV, TQVQL:KPLS-AA¹⁷-LYV, VPQEL:EPLP-AA¹⁷-VYY, VPQKM:EPLP-AA¹⁷-VYY, VPQKL:EPLP-AA¹⁷-VYY, VPQQL:EPLP-AA¹⁷-VYY, VPQRL:EPLP-AA¹⁷-VYY, VPQKT:EPLP-AA¹⁷-VYY, VPQDL:EPLP-AA¹⁷-VYY, VPTEL:EPLP-AA¹⁷-VYY, VPEKM:EPLP-AA¹⁷-VYY, APTKL:EPLP-AA¹⁷-VYY, APTQL:EPLP-AA¹⁷-VYY, VPTKL:EPLP-AA¹⁷-VYY, TPTKM:EPLP-AA¹⁷-VYY, VPARL:EPLP-AA¹⁷-VYY, VPTRL:EPLP-AA¹⁷-VYY, APVKT:EPLP-AA¹⁷-VYY, VSQDL:EPLP-AA¹⁷-VYY, VPTEE:EPLP-AA¹⁷-VYY, VPTGQ:EPLP-AA¹⁷-VYY, SRVHH:EPLP-AA¹⁷-VYY, TQVQL:EPLP-AA¹⁷-VYY, VSQEL:EPLT-AA¹⁷-LYY, VSQKM:EPLT-AA¹⁷-LYY, VSQKL:EPLT-AA¹⁷-LYY, VSQQL:EPLT-AA¹⁷-LYY, VSQRL:EPLT-AA¹⁷-LYY, VSQKT:EPLT-AA¹⁷-LYY, VSQAL:EPLT-AA¹⁷-LYY, VSQDL:EPLT-AA¹⁷-LYY, VPTEL:EPLT-AA¹⁷-LYY, VPEKM:EPLT-AA¹⁷-LYY, APTKL:EPLT-AA¹⁷-LYY, APTQL:EPLT-AA¹⁷-LYY, VPTKL:EPLT-AA¹⁷-LYY, TPTKM:EPLT-AA¹⁷-LYY, VPARL:EPLT-AA¹⁷-LYY, VPTRL:EPLT-AA¹⁷-LYY, APVKT:EPLT-AA¹⁷-LYY, VPQAL:EPLT-AA¹⁷-LYY, VPTEE:EPLT-AA¹⁷-LYY, VPTGQ:EPLT-AA¹⁷-LYY, SRVHH:EPLT-AA¹⁷-LYY, TQVQL:EPLT-AA¹⁷-LYY, VPQEL:EPLT-AA¹⁷-LYY, VPQKM:EPLT-AA¹⁷-LYY, VPQKL:EPLT-AA¹⁷-LYY, VPQQL:EPLT-AA¹⁷-LYY, VPQRL:EPLT-AA¹⁷-LYY, VPQKT:EPLT-AA¹⁷-LYY, VPQDL:EPLT-AA¹⁷-LYY, VPTGQ:SNIT-AA¹⁷-QIM, VPEKM:SNIT-AA¹⁷-QIM, APTKL:SNIT-AA¹⁷-QIM, APTQL:SNIT-AA¹⁷-QIM, TPTKM:SNIT-AA¹⁷-QIM, VPARL:SNIT-AA¹⁷-QIM, APVKT:SNIT-AA¹⁷-QIM, VPQAL:SNIT-AA¹⁷-QIM, VSQDL:SNIT-AA¹⁷-QIM, VPQDL:SNIT-AA¹⁷-QIM, SRVHH:SNIT-AA¹⁷-QIM, TQVQL:SNIT-AA¹⁷-QIM, SRVQL:RSVK-AA¹⁷-AKV, VPTEL:RSVK-AA¹⁷-AKV, VPEKM:RSVK-AA¹⁷-AKV, APTKL:RSVK-AA¹⁷-AKV, APTQL:RSVK-AA¹⁷-AKV, VPTKL:RSVK-AA¹⁷-AKV, TPTKM:RSVK-AA¹⁷-AKV, VPARL:RSVK-AA¹⁷-AKV, VPTRL:RSVK-AA¹⁷-AKV, APVKT:RSVK-AA¹⁷-AKV, VPQAL:RSVK-AA¹⁷-AKV, VSQDL:RSVK-AA¹⁷-AKV, VPQDL:RSVK-AA¹⁷-AKV, VPTEE:RSVK-AA¹⁷-AKV, VPTGQ:RSVK-AA¹⁷-AKV, TQVQL:RSVK-AA¹⁷-AKV, TQVHH:RPVQ-AA¹⁷-RKI, VPTEL:RPVQ-AA¹⁷-RKI, VPEKM:RPVQ-AA¹⁷-RKI, APTKL:RPVQ-AA¹⁷-RKI, APTQL:RPVQ-AA¹⁷-RKI, VPTKL:RPVQ-AA¹⁷-RKI, TPTKM:RPVQ-AA¹⁷-RKI, VPARL:RPVQ-AA¹⁷-RKI, VPTRL:RPVQ-AA¹⁷-RKI, APVKT:RPVQ-AA¹⁷-RKI, VPQAL:RPVQ-AA¹⁷-RKI, VSQDL:RPVQ-AA¹⁷-RKI, VPQDL:RPVQ-AA¹⁷-RKI, VPTEE:RPVQ-AA¹⁷-RKI, VPTGQ:RPVQ-AA¹⁷-RKI and SRVHH:RPVQ-AA¹⁷-RKI; and wherein AA¹⁷ is selected from the group consisting of G, A, V, L, I, P, F, M, W, T and S (in particular is selected from the group consisting of M, I, L, V and T).

[0407] In particular, in certain embodiments, the pair PEP12:PEP7 is selected from the group consisting of GIPEPXX:SAIS-AA¹⁷-LYL, HVTKPTX:SAIS-AA¹⁷-LYL, YVPKPXX:SAIS-AA¹⁷-LYL, TVPKPXX:SAIS-AA¹⁷-LYL, AVPKAXX:SAIS-AA¹⁷-LYL, KVGKAXX:SAIS-AA¹⁷-LYL, KASKAXX:SAIS-AA¹⁷-LYL, GSAGPXX:SAIS-AA¹⁷-LYL, AAPASXX:SAIS-AA¹⁷-LYL, STPPTXX:SAIS-AA¹⁷-LYL, HVPKPXX:SAIS-AA¹⁷-LYL, RVPSTXX:SAIS-AA¹⁷-LYL, ASAAPXX:SAIS-AA¹⁷-LYL, ASASPXX:SAIS-AA¹⁷-LYL, SSVKXQP:SAIS-AA¹⁷-LYL, RNVQXRP:SAIS-AA¹⁷-LYL, KIPKAXX:SSLS-AA¹⁷-LFF, SIPKAXX:SSLS-AA¹⁷-LFF, HVTKPTX:SSLS-AA¹⁷-LFF, YVPKPXX:SSLS-AA¹⁷-LFF, TVPKPXX:SSLS-AA¹⁷-LFF, AVPKAXX:SSLS-AA¹⁷-LFF, KVGKAXX:SSLS-AA¹⁷-LFF, KASKAXX:SSLS-AA¹⁷-LFF, GSAGPXX:SSLS-AA¹⁷-LFF, AAPASXX:SSLS-AA¹⁷-LFF, STPPTXX:SSLS-AA¹⁷-LFF, HVPKPXX:SSLS-AA¹⁷-LFF, RVPSTXX:SSLS-AA¹⁷-LFF, ASAAPXX:SSLS-AA¹⁷-LFF, ASASPXX:SSLS-AA¹⁷-LFF, NDEGLEX:SSLS-AA¹⁷-LFF, SSVKXQP:SSLS-AA¹⁷-LFF, RNVQXRP:SSLS-AA¹⁷-LFF, KIPKAXX:NAIS-AA¹⁷-LYF, GIPEPXX:NAIS-AA¹⁷-LYF, SIPKAXX:NAIS-AA¹⁷-LYF, AVPKAXX:NAIS-AA¹⁷-LYF, KVGKAXX:NAIS-AA¹⁷-LYF, KASKAXX:NAIS-AA¹⁷-LYF, GSAGPXX:NAIS-AA¹⁷-LYF, AAPASXX:NAIS-AA¹⁷-LYF, STPPTXX:NAIS-AA¹⁷-LYF, RVPSTXX:NAIS-AA¹⁷-LYF, ASAAPXX:NAIS-AA¹⁷-LYF, ASASPXX:NAIS-AA¹⁷-LYF, NDEGLEX:NAIS-AA¹⁷-LYF, SSVKXQP:NAIS-AA¹⁷-LYF, RNVQXRP:NAIS-AA¹⁷-LYF, KIPKAXX:SATS-AA¹⁷-LYY, GIPEPXX:SATS-AA¹⁷-LYY, SIPKAXX:SATS-AA¹⁷-LYY, HVTKPTX:SATS-AA¹⁷-LYY, YVPKPXX:SATS-AA¹⁷-LYY, TVPKPXX:SATS-AA¹⁷-LYY, KVGKAXX:SATS-AA¹⁷-LYY, KASKAXX:SATS-AA¹⁷-LYY, GSAGPXX:SATS-AA¹⁷-LYY, AAPASXX:SATS-AA¹⁷-LYY, STPPTXX:SATS-AA¹⁷-LYY, HVPKPXX:SATS-AA¹⁷-LYY, RVPSTXX:SATS-AA¹⁷-LYY, ASAAPXX:SATS-AA¹⁷-LYY, ASASPXX:SATS-AA¹⁷-LYY, NDEGLEX:SATS-AA¹⁷-LYY, SSVKXQP:SATS-AA¹⁷-LYY, RNVQXRP:SATS-AA¹⁷-LYY, KIPKAXX:SPIS-AA¹⁷-LYK, GIPEPXX:SPIS-AA¹⁷-LYK, SIPKAXX:SPIS-AA¹⁷-LYK, HVTKPTX:SPIS-AA¹⁷-LYK, YVPKPXX:SPIS-AA¹⁷-LYK, TVPKPXX:SPIS-AA¹⁷-LYK, AVPKAXX:SPIS-AA¹⁷-LYK, KASKAXX:SPIS-AA¹⁷-LYK, GSAGPXX:SPIS-AA¹⁷-LYK, AAPASXX:SPIS-AA¹⁷-LYK, STPPTXX:SPIS-AA¹⁷-LYK, HVPKPXX:SPIS-AA¹⁷-LYK, RVPSTXX:SPIS-AA¹⁷-LYK, ASAAPXX:SPIS-AA¹⁷-LYK, ASASPXX:SPIS-AA¹⁷-LYK, SSVKXQP:SPIS-AA¹⁷-LYK, RNVQXRP:SPIS-AA¹⁷-LYK, KIPKAXX:EPIS-AA¹⁷-LYL, GIPEPXX:EPIS-AA¹⁷-LYL, SIPKAXX:EPIS-AA¹⁷-LYL, HVTKPTX:EPIS-AA¹⁷-LYL, YVPKPXX:EPIS-AA¹⁷-LYL, TVPKPXX:EPIS-AA¹⁷-LYL, AVPKAXX:EPIS-AA¹⁷-LYL, KVGKAXX:EPIS-AA¹⁷-LYL, GSAGPXX:EPIS-AA¹⁷-LYL, AAPASXX:EPIS-AA¹⁷-LYL, STPPTXX:EPIS-AA¹⁷-LYL, HVPKPXX:EPIS-AA¹⁷-LYL, RVPSTXX:EPIS-AA¹⁷-LYL, ASAAPXX:EPIS-AA¹⁷-LYL, ASASPXX:EPIS-AA¹⁷-LYL, SSVKXQP:EPIS-AA¹⁷-LYL, RNVQXRP:EPIS-AA¹⁷-LYL, KIPKAXX:SPIN-AA¹⁷-LYF, GIPEPXX:SPIN-AA¹⁷-LYF, SIPKAXX:SPIN-AA¹⁷-LYF, HVTKPTX:SPIN-AA¹⁷-LYF, YVPKPXX:SPIN-AA¹⁷-LYF, TVPKPXX:SPIN-AA¹⁷-LYF, AVPKAXX:SPIN-AA¹⁷-LYF, KVGKAXX:SPIN-AA¹⁷-LYF, KASKAXX:SPIN-AA¹⁷-LYF, AAPASXX:SPIN-AA¹⁷-LYF, STPPTXX:SPIN-AA¹⁷-LYF, HVPKPXX:SPIN-AA¹⁷-LYF, RVPSTXX:SPIN-AA¹⁷-LYF, ASAAPXX:SPIN-AA¹⁷-LYF, ASASPXX:SPIN-AA¹⁷-LYF, NDEGLEX:SPIN-AA¹⁷-LYF, SSVKXQP:SPIN-AA¹⁷-LYF, RNVQXRP:SPIN-AA¹⁷-LYF, KIPKAXX:SPIS-AA¹⁷-LYI, GIPEPXX:SPIS-AA¹⁷-LYI, SIPKAXX:SPIS-AA¹⁷-LYI, HVTKPTX:SPIS-AA¹⁷-LYI, YVPKPXX:SPIS-AA¹⁷-LYI, TVPKPXX:SPIS-AA¹⁷-LYI, AVPKAXX:SPIS-AA¹⁷-LYI, KVGKAXX:SPIS-AA¹⁷-LYI, KASKAXX:SPIS-AA¹⁷-LYI, GSAGPXX:SPIS-AA¹⁷-LYI, STPPTXX:SPIS-AA¹⁷-LYI, HVPKPXX:SPIS-AA¹⁷-LYI, RVPSTXX:SPIS-AA¹⁷-LYI, ASAAPXX:SPIS-AA¹⁷-LYI, ASASPXX:SPIS-AA¹⁷-LYI, NDEGLEX:SPIS-AA¹⁷-LYI, SSVKXQP:SPIS-AA¹⁷-LYI, RNVQXRP:SPIS-AA¹⁷-LYI, KIPKAXX:SPIS-AA¹⁷-LFI, GIPEPXX:SPIS-AA¹⁷-LFI, SIPKAXX:SPIS-AA¹⁷-LFI, HVTKPTX:SPIS-AA¹⁷-LFI, YVPKPXX:SPIS-AA¹⁷-LFI, TVPKPXX:SPIS-AA¹⁷-LFI, AVPKAXX:SPIS-AA¹⁷-LFI, KVGKAXX:SPIS-AA¹⁷-LFI, KASKAXX:SPIS-AA¹⁷-LFI, GSAGPXX:SPIS-AA¹⁷-LFI, AAPASXX:SPIS-AA¹⁷-LFI, HVPKPXX:SPIS-AA¹⁷-LFI, RVPSTXX:SPIS-AA¹⁷-LFI, ASAAPXX:SPIS-AA¹⁷-LFI, ASASPXX:SPIS-AA¹⁷-LFI, SSVKXQP:SPIS-AA¹⁷-LFI, RNVQXRP:SPIS-AA¹⁷-LFI, KIPKAXX:KPLS-AA¹⁷-LYV, GIPEPXX:KPLS-AA¹⁷-LYV, SIPKAXX:KPLS-AA¹⁷-LYV, HVTKPTX:KPLS-AA¹⁷-LYV, YVPKPXX:KPLS-AA¹⁷-LYV, TVPKPXX:KPLS-AA¹⁷-LYV, AVPKAXX:KPLS-AA¹⁷-LYV, KVGKAXX:KPLS-AA¹⁷-LYV, KASKAXX:KPLS-AA¹⁷-LYV, GSAGPXX:KPLS-AA¹⁷-LYV, AAPASXX:KPLS-AA¹⁷-LYV, STPPTXX:KPLS-AA¹⁷-LYV, HVPKPXX:KPLS-AA¹⁷-LYV, ASAAPXX:KPLS-AA¹⁷-LYV, ASASPXX:KPLS-AA¹⁷-LYV, NDEGLEX:KPLS-AA¹⁷-LYV, SSVKXQP:KPLS-AA¹⁷-LYV, RNVQXRP:KPLS-AA¹⁷-LYV, KIPKAXX:EPLP-AA¹⁷-VYY, GIPEPXX:EPLP-AA¹⁷-VYY, SIPKAXX:EPLP-AA¹⁷-VYY, HVTKPTX:EPLP-AA¹⁷-VYY, YVPKPXX:EPLP-AA¹⁷-VYY, TVPKPXX:EPLP-AA¹⁷-VYY, AVPKAXX:EPLP-AA¹⁷-VYY, KVGKAXX:EPLP-AA¹⁷-VYY, KASKAXX:EPLP-AA¹⁷-VYY, GSAGPXX:EPLP-AA¹⁷-VYY, AAPASXX:EPLP-AA¹⁷-VYY, STPPTXX:EPLP-AA¹⁷-VYY, HVPKPXX:EPLP-AA¹⁷-VYY, RVPSTXX:EPLP-AA¹⁷-VYY, ASASPXX:EPLP-AA¹⁷-VYY, NDEGLEX:EPLP-AA¹⁷-VYY, SSVKXQP:EPLP-AA¹⁷-VYY, RNVQXRP:EPLP-AA¹⁷-VYY, KIPKAXX:EPLT-AA¹⁷-LYY, GIPEPXX:EPLT-AA¹⁷-LYY, SIPKAXX:EPLT-AA¹⁷-LYY, HVTKPTX:EPLT-AA¹⁷-LYY, YVPKPXX:EPLT-AA¹⁷-LYY, TVPKPXX:EPLT-AA¹⁷-LYY, AVPKAXX:EPLT-AA¹⁷-LYY, KVGKAXX:EPLT-AA¹⁷-LYY, KASKAXX:EPLT-AA¹⁷-LYY, GSAGPXX:EPLT-AA¹⁷-LYY, AAPASXX:EPLT-AA¹⁷-LYY, STPPTXX:EPLT-AA¹⁷-LYY, HVPKPXX:EPLT-AA¹⁷-LYY, RVPSTXX:EPLT-AA¹⁷-LYY, ASAAPXX:EPLT-AA¹⁷-LYY, ASASPXX:EPLT-AA¹⁷-LYY, NDEGLEX:EPLT-AA¹⁷-LYY, SSVKXQP:EPLT-AA¹⁷-LYY, RNVQXRP:EPLT-AA¹⁷-LYY, NDEGLEX:SNIT-AA¹⁷-QIM, GIPEPXX:SNIT-AA¹⁷-QIM, HVTKPTX:SNIT-AA¹⁷-QIM, YVPKPXX:SNIT-AA¹⁷-QIM, TVPKPXX:SNIT-AA¹⁷-QIM, AVPKAXX:SNIT-AA¹⁷-QIM, GSAGPXX:SNIT-AA¹⁷-QIM, AAPASXX:SNIT-AA¹⁷-QIM, HVPKPXX:SNIT-AA¹⁷-QIM, RVPSTXX:SNIT-AA¹⁷-QIM, ASAAPXX:SNIT-AA¹⁷-QIM, ASASPXX:SNIT-AA¹⁷-QIM, SSVKXQP:SNIT-AA¹⁷-QIM, RNVQXRP:SNIT-AA¹⁷-QIM, RNVQXRP:RSVK-AA¹⁷-AKV, KIPKAXX:RSVK-AA¹⁷-AKV, GIPEPXX:RSVK-AA¹⁷-AKV, SIPKAXX:RSVK-AA¹⁷-AKV, HVTKPTX:RSVK-AA¹⁷-AKV, YVPKPXX:RSVK-AA¹⁷-AKV, TVPKPXX:RSVK-AA¹⁷-AKV, AVPKAXX:RSVK-AA¹⁷-AKV, KVGKAXX:RSVK-AA¹⁷-AKV, KASKAXX:RSVK-AA¹⁷-AKV, GSAGPXX:RSVK-AA¹⁷-AKV, AAPASXX:RSVK-AA¹⁷-AKV, STPPTXX:RSVK-AA¹⁷-AKV, HVPKPXX:RSVK-AA¹⁷-AKV, RVPSTXX:RSVK-AA¹⁷-AKV, ASAAPXX:RSVK-AA¹⁷-AKV, ASASPXX:RSVK-AA¹⁷-AKV, NDEGLEX:RSVK-AA¹⁷-AKV, SSVKXQP:RPVQ-AA¹⁷-RKI, KIPKAXX:RPVQ-AA¹⁷-RKI, GIPEPXX:RPVQ-AA¹⁷-RKI, SIPKAXX:RPVQ-AA¹⁷-RKI, HVTKPTX:RPVQ-AA¹⁷-RKI, YVPKPXX:RPVQ-AA¹⁷-RKI, TVPKPXX:RPVQ-AA¹⁷-RKI, AVPKAXX:RPVQ-AA¹⁷-RKI, KVGKAXX:RPVQ-AA¹⁷-RKI, KASKAXX:RPVQ-AA¹⁷-RKI, GSAGPXX:RPVQ-AA¹⁷-RKI, AAPASXX:RPVQ-AA¹⁷-RKI, STPPTXX:RPVQ-AA¹⁷-RKI, HVPKPXX:RPVQ-AA¹⁷-RKI, RVPSTXX:RPVQ-AA¹⁷-RKI, ASAAPXX:RPVQ-AA¹⁷-RKI, ASASPXX:RPVQ-AA¹⁷-RKI and NDEGLEX:RPVQ-AA¹⁷-RKI; and wherein AA¹⁷ is selected from the group consisting of G, A, V, L, I, P, F, M, W, T and S (in particular is selected from the group consisting of M, I, L, V and T).

[0408] In particular, in certain embodiments, the pair PEP12:PEP9 is selected from the group consisting of GIPEPXXVPTKM:SAIS-AA¹⁷-LYL, HVTKPTXVPTKL:SAIS-AA¹⁷-LYL, YVPKPXXVPTKL:SAIS-AA¹⁷-LYL, TVPKPXXVPTQL:SAIS-AA¹⁷-LYL, AVPKAXXVPTKL:SAIS-AA¹⁷-LYL, KVGKAXXVPTKL:SAIS-AA¹⁷-LYL, KASKAXXVPTKL:SAIS-AA¹⁷-LYL, GSAGPXXVPTKM:SAIS-AA¹⁷-LYL, AAPASXXVPTRL:SAIS-AA¹⁷-LYL, STPPTXXVPTRL:SAIS-AA¹⁷-LYL, HVPKPXXVPTKL:SAIS-AA¹⁷-LYL, RVPSTXXVPTKT:SAIS-AA¹⁷-LYL, ASAAPXXVPTAL:SAIS-AA¹⁷-LYL, ASASPXXVPTDL:SAIS-AA¹⁷-LYL, GIPEPXXVPEKM:SAIS-AA¹⁷-LYL, HVTKPTXAPTKL:SAIS-AA¹⁷-LYL, YVPKPXXAPTKL:SAIS-AA¹⁷-LYL, TVPKPXXAPTQL:SAIS-AA¹⁷-LYL, AVPKAXXAPTKL:SAIS-AA¹⁷-LYL, GSAGPXXTPTKM:SAIS-AA¹⁷-LYL, AAPASXXVPARL:SAIS-AA¹⁷-LYL, HVPKPXXAPTKL:SAIS-AA¹⁷-LYL, RVPSTXXAPVKT:SAIS-AA¹⁷-LYL, ASAAPXXVPQAL:SAIS-AA¹⁷-LYL, ASASPXXVSQDL:SAIS-AA¹⁷-LYL, ASASPXXVPQDL:SAIS-AA¹⁷-LYL, SSVKXQPSRVHH:SAIS-AA¹⁷-LYL, RNVQXRPTQVQL:SAIS-AA¹⁷-LYL, KIPKAXXVPEEL:SSLS-AA¹⁷-LFF, SIPKAXXVPEEL:SSLS-AA¹⁷-LFF, HVTKPTXVPEKL:SSLS-AA¹⁷-LFF, YVPKPXXVPEKL:SSLS-AA¹⁷-LFF, TVPKPXXVPEQL:SSLS-AA¹⁷-LFF, AVPKAXXVPEKL:SSLS-AA¹⁷-LFF, KVGKAXXVPEKL:SSLS-AA¹⁷-LFF, KASKAXXVPEKL:SSLS-AA¹⁷-LFF, GSAGPXXVPEKM:SSLS-AA¹⁷-LFF, AAPASXXVPERL:SSLS-AA¹⁷-LFF, STPPTXXVPERL:SSLS-AA¹⁷-LFF, HVPKPXXVPEKL:SSLS-AA¹⁷-LFF, RVPSTXXVPEKT:SSLS-AA¹⁷-LFF, ASAAPXXVPEAL:SSLS-AA¹⁷-LFF, ASASPXXVPEDL:SSLS-AA¹⁷-LFF, KIPKAXXVPTEL:SSLS-AA¹⁷-LFF, SIPKAXXVPTEL:SSLS-AA¹⁷-LFF, HVTKPTXAPTKL:SSLS-AA¹⁷-LFF, YVPKPXXAPTKL:SSLS-AA¹⁷-LFF, TVPKPXXAPTQL:SSLS-AA¹⁷-LFF, AVPKAXXAPTKL:SSLS-AA¹⁷-LFF, KVGKAXXVPTKL:SSLS-AA¹⁷-LFF, KASKAXXVPTKL:SSLS-AA¹⁷-LFF, GSAGPXXTPTKM:SSLS-AA¹⁷-LFF, AAPASXXVPARL:SSLS-AA¹⁷-LFF, STPPTXXVPTRL:SSLS-AA¹⁷-LFF, HVPKPXXAPTKL:SSLS-AA¹⁷-LFF, RVPSTXXAPVKT:SSLS-AA¹⁷-LFF, ASAAPXXVPQAL:SSLS-AA¹⁷-LFF, ASASPXXVSQDL:SSLS-AA¹⁷-LFF, ASASPXXVPQDL:SSLS-AA¹⁷-LFF, NDEGLEXVPTEE:SSLS-AA¹⁷-LFF, NDEGLEXVPTGQ:SSLS-AA¹⁷-LFF, SSVKXQPSRVHH:SSLS-AA¹⁷-LFF, RNVQXRPTQVQL:SSLS-AA¹⁷-LFF, KIPKAXXAPTEL:NAIS-AA¹⁷-LYF, GIPEPXXAPTKM:NAIS-AA¹⁷-LYF, SIPKAXXAPTEL:NAIS-AA¹⁷-LYF, AVPKAXXAPTKL:NAIS-AA¹⁷-LYF, KVGKAXXAPTKL:NAIS-AA¹⁷-LYF, KASKAXXAPTKL:NAIS-AA¹⁷-LYF, GSAGPXXAPTKM:NAIS-AA¹⁷-LYF, AAPASXXAPTRL:NAIS-AA¹⁷-LYF, STPPTXXAPTRL:NAIS-AA¹⁷-LYF, RVPSTXXAPTKT:NAIS-AA¹⁷-LYF, ASAAPXXAPTAL:NAIS-AA¹⁷-LYF, ASASPXXAPTDL:NAIS-AA¹⁷-LYF, KIPKAXXVPTEL:NAIS-AA¹⁷-LYF, GIPEPXXVPEKM:NAIS-AA¹⁷-LYF, SIPKAXXVPTEL:NAIS-AA¹⁷-LYF, KVGKAXXVPTKL:NAIS-AA¹⁷-LYF, KASKAXXVPTKL:NAIS-AA¹⁷-LYF, GSAGPXXTPTKM:NAIS-AA¹⁷-LYF, AAPASXXVPARL:NAIS-AA¹⁷-LYF, STPPTXXVPTRL:NAIS-AA¹⁷-LYF, RVPSTXXAPVKT:NAIS-AA¹⁷-LYF, ASAAPXXVPQAL:NAIS-AA¹⁷-LYF, ASASPXXVSQDL:NAIS-AA¹⁷-LYF, ASASPXXVPQDL:NAIS-AA¹⁷-LYF, NDEGLEXVPTEE:NAIS-AA¹⁷-LYF, NDEGLEXVPTGQ:NAIS-AA¹⁷-LYF, SSVKXQPSRVHH:NAIS-AA¹⁷-LYF, RNVQXRPTQVQL:NAIS-AA¹⁷-LYF, KIPKAXXAPTEL:SATS-AA¹⁷-LYY, GIPEPXXAPTKM:SATS-AA¹⁷-LYY, SIPKAXXAPTEL:SATS-AA¹⁷-LYY, HVTKPTXAPTKL:SATS-AA¹⁷-LYY, YVPKPXXAPTKL:SATS-AA¹⁷-LYY, TVPKPXXAPTQL:SATS-AA¹⁷-LYY, KVGKAXXAPTKL:SATS-AA¹⁷-LYY, KASKAXXAPTKL:SATS-AA¹⁷-LYY, GSAGPXXAPTKM:SATS-AA¹⁷-LYY, AAPASXXAPTRL:SATS-AA¹⁷-LYY, STPPTXXAPTRL:SATS-AA¹⁷-LYY, HVPKPXXAPTKL:SATS-AA¹⁷-LYY, RVPSTXXAPTKT:SATS-AA¹⁷-LYY, ASAAPXXAPTAL:SATS-AA¹⁷-LYY, ASASPXXAPTDL:SATS-AA¹⁷-LYY, KIPKAXXVPTEL:SATS-AA¹⁷-LYY, GIPEPXXVPEKM:SATS-AA¹⁷-LYY, SIPKAXXVPTEL:SATS-AA¹⁷-LYY, KVGKAXXVPTKL:SATS-AA¹⁷-LYY, KASKAXXVPTKL:SATS-AA¹⁷-LYY, GSAGPXXTPTKM:SATS-AA¹⁷-LYY, AAPASXXVPARL:SATS-AA¹⁷-LYY, STPPTXXVPTRL:SATS-AA¹⁷-LYY, RVPSTXXAPVKT:SATS-AA¹⁷-LYY, ASAAPXXVPQAL:SATS-AA¹⁷-LYY, ASASPXXVSQDL:SATS-AA¹⁷-LYY, ASASPXXVPQDL:SATS-AA¹⁷-LYY, NDEGLEXVPTEE:SATS-AA¹⁷-LYY, NDEGLEXVPTGQ:SATS-AA¹⁷-LYY, SSVKXQPSRVHH:SATS-AA¹⁷-LYY, RNVQXRPTQVQL:SATS-AA¹⁷-LYY, KIPKAXXVPTEL:SPIS-AA¹⁷-LYK, GIPEPXXVPTKM:SPIS-AA¹⁷-LYK, SIPKAXXVPTEL:SPIS-AA¹⁷-LYK, HVTKPTXVPTKL:SPIS-AA¹⁷-LYK, YVPKPXXVPTKL:SPIS-AA¹⁷-LYK, TVPKPXXVPTQL:SPIS-AA¹⁷-LYK, AVPKAXXVPTKL:SPIS-AA¹⁷-LYK, KASKAXXVPTKL:SPIS-AA¹⁷-LYK, GSAGPXXVPTKM:SPIS-AA¹⁷-LYK, AAPASXXVPTRL:SPIS-AA¹⁷-LYK, STPPTXXVPTRL:SPIS-AA¹⁷-LYK, HVPKPXXVPTKL:SPIS-AA¹⁷-LYK, RVPSTXXVPTKT:SPIS-AA¹⁷-LYK, ASAAPXXVPTAL:SPIS-AA¹⁷-LYK, ASASPXXVPTDL:SPIS-AA¹⁷-LYK, GIPEPXXVPEKM:SPIS-AA¹⁷-LYK, HVTKPTXAPTKL:SPIS-AA¹⁷-LYK, YVPKPXXAPTKL:SPIS-AA¹⁷-LYK, TVPKPXXAPTQL:SPIS-AA¹⁷-LYK, AVPKAXXAPTKL:SPIS-AA¹⁷-LYK, GSAGPXXTPTKM:SPIS-AA¹⁷-LYK, AAPASXXVPARL:SPIS-AA¹⁷-LYK, HVPKPXXAPTKL:SPIS-AA¹⁷-LYK, RVPSTXXAPVKT:SPIS-AA¹⁷-LYK, ASAAPXXVPQAL:SPIS-AA¹⁷-LYK, ASASPXXVSQDL:SPIS-AA¹⁷-LYK, ASASPXXVPQDL:SPIS-AA¹⁷-LYK, SSVKXQPSRVHH:SPIS-AA¹⁷-LYK, RNVQXRPTQVQL:SPIS-AA¹⁷-LYK, KIPKAXXVPTEL:EPIS-AA¹⁷-LYL, GIPEPXXVPTKM:EPIS-AA¹⁷-LYL, SIPKAXXVPTEL:EPIS-AA¹⁷-LYL, HVTKPTXVPTKL:EPIS-AA¹⁷-LYL, YVPKPXXVPTKL:EPIS-AA¹⁷-LYL, TVPKPXXVPTQL:EPIS-AA¹⁷-LYL, AVPKAXXVPTKL:EPIS-AA¹⁷-LYL, KVGKAXXVPTKL:EPIS-AA¹⁷-LYL, GSAGPXXVPTKM:EPIS-AA¹⁷-LYL, AAPASXXVPTRL:EPIS-AA¹⁷-LYL, STPPTXXVPTRL:EPIS-AA¹⁷-LYL, HVPKPXXVPTKL:EPIS-AA¹⁷-LYL, RVPSTXXVPTKT:EPIS-AA¹⁷-LYL, ASAAPXXVPTAL:EPIS-AA¹⁷-LYL, ASASPXXVPTDL:EPIS-AA¹⁷-LYL, GIPEPXXVPEKM:EPIS-AA¹⁷-LYL, HVTKPTXAPTKL:EPIS-AA¹⁷-LYL, YVPKPXXAPTKL:EPIS-AA¹⁷-LYL, TVPKPXXAPTQL:EPIS-AA¹⁷-LYL, AVPKAXXAPTKL:EPIS-AA¹⁷-LYL, GSAGPXXTPTKM:EPIS-AA¹⁷-LYL, AAPASXXVPARL:EPIS-AA¹⁷-LYL, HVPKPXXAPTKL:EPIS-AA¹⁷-LYL, RVPSTXXAPVKT:EPIS-AA¹⁷-LYL, ASAAPXXVPQAL:EPIS-AA¹⁷-LYL, ASASPXXVSQDL:EPIS-AA¹⁷-LYL, ASASPXXVPQDL:EPIS-AA¹⁷-LYL, SSVKXQPSRVHH:EPIS-AA¹⁷-LYL, RNVQXRPTQVQL:EPIS-AA¹⁷-LYL, KIPKAXXTPTEL:SPIN-AA¹⁷-LYF, GIPEPXXTPTKM:SPIN-AA¹⁷-LYF, SIPKAXXTPTEL:SPIN-AA¹⁷-LYF, HVTKPTXTPTKL:SPIN-AA¹⁷-LYF, YVPKPXXTPTKL:SPIN-AA¹⁷-LYF, TVPKPXXTPTQL:SPIN-AA¹⁷-LYF, AVPKAXXTPTKL:SPIN-AA¹⁷-LYF, KVGKAXXTPTKL:SPIN-AA¹⁷-LYF, KASKAXXTPTKL:SPIN-AA¹⁷-LYF, AAPASXXTPTRL:SPIN-AA¹⁷-LYF, STPPTXXTPTRL:SPIN-AA¹⁷-LYF, HVPKPXXTPTKL:SPIN-AA¹⁷-LYF, RVPSTXXTPTKT:SPIN-AA¹⁷-LYF, ASAAPXXTPTAL:SPIN-AA¹⁷-LYF, ASASPXXTPTDL:SPIN-AA¹⁷-LYF, KIPKAXXVPTEL:SPIN-AA¹⁷-LYF, GIPEPXXVPEKM:SPIN-AA¹⁷-LYF, SIPKAXXVPTEL:SPIN-AA¹⁷-LYF, HVTKPTXAPTKL:SPIN-AA¹⁷-LYF, YVPKPXXAPTKL:SPIN-AA¹⁷-LYF, TVPKPXXAPTQL:SPIN-AA¹⁷-LYF, AVPKAXXAPTKL:SPIN-AA¹⁷-LYF, KVGKAXXVPTKL:SPIN-AA¹⁷-LYF, KASKAXXVPTKL:SPIN-AA¹⁷-LYF, AAPASXXVPARL:SPIN-AA¹⁷-LYF, STPPTXXVPTRL:SPIN-AA¹⁷-LYF, HVPKPXXAPTKL:SPIN-AA¹⁷-LYF, RVPSTXXAPVKT:SPIN-AA¹⁷-LYF, ASAAPXXVPQAL:SPIN-AA¹⁷-LYF, ASASPXXVSQDL:SPIN-AA¹⁷-LYF, ASASPXXVPQDL:SPIN-AA¹⁷-LYF, NDEGLEXVPTEE:SPIN-AA¹⁷-LYF, NDEGLEXVPTGQ:SPIN-AA¹⁷-LYF, SSVKXQPSRVHH:SPIN-AA¹⁷-LYF, RNVQXRPTQVQL:SPIN-AA¹⁷-LYF, KIPKAXXVPAEL:SPIS-AA¹⁷-LYI, GIPEPXXVPAKM:SPIS-AA¹⁷-LYI, SIPKAXXVPAEL:SPIS-AA¹⁷-LYI, HVTKPTXVPAKL:SPIS-AA¹⁷-LYI, YVPKPXXVPAKL:SPIS-AA¹⁷-LYI, TVPKPXXVPAQL:SPIS-AA¹⁷-LYI, AVPKAXXVPAKL:SPIS-AA¹⁷-LYI, KVGKAXXVPAKL:SPIS-AA¹⁷-LYI, KASKAXXVPAKL:SPIS-AA¹⁷-LYI, GSAGPXXVPAKM:SPIS-AA¹⁷-LYI, STPPTXXVPARL:SPIS-AA¹⁷-LYI, HVPKPXXVPAKL:SPIS-AA¹⁷-LYI, RVPSTXXVPAKT:SPIS-AA¹⁷-LYI, ASAAPXXVPAAL:SPIS-AA¹⁷-LYI, ASASPXXVPADL:SPIS-AA¹⁷-LYI, KIPKAXXVPTEL:SPIS-AA¹⁷-LYI, GIPEPXXVPEKM:SPIS-AA¹⁷-LYI, SIPKAXXVPTEL:SPIS-AA¹⁷-LYI, HVTKPTXAPTKL:SPIS-AA¹⁷-LYI, YVPKPXXAPTKL:SPIS-AA¹⁷-LYI, TVPKPXXAPTQL:SPIS-AA¹⁷-LYI, AVPKAXXAPTKL:SPIS-AA¹⁷-LYI, KVGKAXXVPTKL:SPIS-AA¹⁷-LYI, KASKAXXVPTKL:SPIS-AA¹⁷-LYI, GSAGPXXTPTKM:SPIS-AA¹⁷-LYI, STPPTXXVPTRL:SPIS-AA¹⁷-LYI, HVPKPXXAPTKL:SPIS-AA¹⁷-LYI, RVPSTXXAPVKT:SPIS-AA¹⁷-LYI, ASAAPXXVPQAL:SPIS-AA¹⁷-LYI, ASASPXXVSQDL:SPIS-AA¹⁷-LYI, ASASPXXVPQDL:SPIS-AA¹⁷-LYI, NDEGLEXVPTEE:SPIS-AA¹⁷-LYI, NDEGLEXVPTGQ:SPIS-AA¹⁷-LYI, SSVKXQPSRVHH:SPIS-AA¹⁷-LYI, RNVQXRPTQVQL:SPIS-AA¹⁷-LYI, KIPKAXXVPTEL:SPIS-AA¹⁷-LFI, GIPEPXXVPTKM:SPIS-AA¹⁷-LFI, SIPKAXXVPTEL:SPIS-AA¹⁷-LFI, HVTKPTXVPTKL:SPIS-AA¹⁷-LFI, YVPKPXXVPTKL:SPIS-AA¹⁷-LFI, TVPKPXXVPTQL:SPIS-AA¹⁷-LFI, AVPKAXXVPTKL:SPIS-AA¹⁷-LFI, KVGKAXXVPTKL:SPIS-AA¹⁷-LFI, KASKAXXVPTKL:SPIS-AA¹⁷-LFI, GSAGPXXVPTKM:SPIS-AA¹⁷-LFI, AAPASXXVPTRL:SPIS-AA¹⁷-LFI, HVPKPXXVPTKL:SPIS-AA¹⁷-LFI, RVPSTXXVPTKT:SPIS-AA¹⁷-LFI, ASAAPXXVPTAL:SPIS-AA¹⁷-LFI, ASASPXXVPTDL:SPIS-AA¹⁷-LFI, GIPEPXXVPEKM:SPIS-AA¹⁷-LFI, HVTKPTXAPTKL:SPIS-AA¹⁷-LFI, YVPKPXXAPTKL:SPIS-AA¹⁷-LFI, TVPKPXXAPTQL:SPIS-AA¹⁷-LFI, AVPKAXXAPTKL:SPIS-AA¹⁷-LFI, GSAGPXXTPTKM:SPIS-AA¹⁷-LFI, AAPASXXVPARL:SPIS-AA¹⁷-LFI, HVPKPXXAPTKL:SPIS-AA¹⁷-LFI, RVPSTXXAPVKT:SPIS-AA¹⁷-LFI, ASAAPXXVPQAL:SPIS-AA¹⁷-LFI, ASASPXXVSQDL:SPIS-AA¹⁷-LFI, ASASPXXVPQDL:SPIS-AA¹⁷-LFI, SSVKXQPSRVHH:SPIS-AA¹⁷-LFI, RNVQXRPTQVQL:SPIS-AA¹⁷-LFI, KIPKAXXAPVEL:KPLS-AA¹⁷-LYV, GIPEPXXAPVKM:KPLS-AA¹⁷-LYV, SIPKAXXAPVEL:KPLS-AA¹⁷-LYV, HVTKPTXAPVKL:KPLS-AA¹⁷-LYV, YVPKPXXAPVKL:KPLS-AA¹⁷-LYV, TVPKPXXAPVQL:KPLS-AA¹⁷-LYV, AVPKAXXAPVKL:KPLS-AA¹⁷-LYV, KVGKAXXAPVKL:KPLS-AA¹⁷-LYV, KASKAXXAPVKL:KPLS-AA¹⁷-LYV, GSAGPXXAPVKM:KPLS-AA¹⁷-LYV, AAPASXXAPVRL:KPLS-AA¹⁷-LYV, STPPTXXAPVRL:KPLS-AA¹⁷-LYV, HVPKPXXAPVKL:KPLS-AA¹⁷-LYV, ASAAPXXAPVAL:KPLS-AA¹⁷-LYV, ASASPXXAPVDL:KPLS-AA¹⁷-LYV, KIPKAXXVPTEL:KPLS-AA¹⁷-LYV, GIPEPXXVPEKM:KPLS-AA¹⁷-LYV, SIPKAXXVPTEL:KPLS-AA¹⁷-LYV, HVTKPTXAPTKL:KPLS-AA¹⁷-LYV, YVPKPXXAPTKL:KPLS-AA¹⁷-LYV, TVPKPXXAPTQL:KPLS-AA¹⁷-LYV, AVPKAXXAPTKL:KPLS-AA¹⁷-LYV, KVGKAXXVPTKL:KPLS-AA¹⁷-LYV, KASKAXXVPTKL:KPLS-AA¹⁷-LYV, GSAGPXXTPTKM:KPLS-AA¹⁷-LYV, AAPASXXVPARL:KPLS-AA¹⁷-LYV, STPPTXXVPTRL:KPLS-AA¹⁷-LYV, HVPKPXXAPTKL:KPLS-AA¹⁷-LYV, ASAAPXXVPQAL:KPLS-AA¹⁷-LYV, ASASPXXVSQDL:KPLS-AA¹⁷-LYV, ASASPXXVPQDL:KPLS-AA¹⁷-LYV, NDEGLEXVPTEE:KPLS-AA¹⁷-LYV, NDEGLEXVPTGQ:KPLS-AA¹⁷-LYV, SSVKXQPSRVHH:KPLS-AA¹⁷-LYV, RNVQXRPTQVQL:KPLS-AA¹⁷-LYV, KIPKAXXVPQEL:EPLP-AA¹⁷-VYY, GIPEPXXVPQKM:EPLP-AA¹⁷-VYY, SIPKAXXVPQEL:EPLP-AA¹⁷-VYY, HVTKPTXVPQKL:EPLP-AA¹⁷-VYY, YVPKPXXVPQKL:EPLP-AA¹⁷-VYY, TVPKPXXVPQQL:EPLP-AA¹⁷-VYY, AVPKAXXVPQKL:EPLP-AA¹⁷-VYY, KVGKAXXVPQKL:EPLP-AA¹⁷-VYY, KASKAXXVPQKL:EPLP-AA¹⁷-VYY, GSAGPXXVPQKM:EPLP-AA¹⁷-VYY, AAPASXXVPQRL:EPLP-AA¹⁷-VYY, STPPTXXVPQRL:EPLP-AA¹⁷-VYY, HVPKPXXVPQKL:EPLP-AA¹⁷-VYY, RVPSTXXVPQKT:EPLP-AA¹⁷-VYY, ASASPXXVPQDL:EPLP-AA¹⁷-VYY, KIPKAXXVPTEL:EPLP-AA¹⁷-VYY, GIPEPXXVPEKM:EPLP-AA¹⁷-VYY, SIPKAXXVPTEL:EPLP-AA¹⁷-VYY, HVTKPTXAPTKL:EPLP-AA¹⁷-VYY, YVPKPXXAPTKL:EPLP-AA¹⁷-VYY, TVPKPXXAPTQL:EPLP-AA¹⁷-VYY, AVPKAXXAPTKL:EPLP-AA¹⁷-VYY, KVGKAXXVPTKL:EPLP-AA¹⁷-VYY, KASKAXXVPTKL:EPLP-AA¹⁷-VYY, GSAGPXXTPTKM:EPLP-AA¹⁷-VYY, AAPASXXVPARL:EPLP-AA¹⁷-VYY, STPPTXXVPTRL:EPLP-AA¹⁷-VYY, HVPKPXXAPTKL:EPLP-AA¹⁷-VYY, RVPSTXXAPVKT:EPLP-AA¹⁷-VYY, ASASPXXVSQDL:EPLP-AA¹⁷-VYY, NDEGLEXVPTEE:EPLP-AA¹⁷-VYY, NDEGLEXVPTGQ:EPLP-AA¹⁷-VYY, SSVKXQPSRVHH:EPLP-AA¹⁷-VYY, RNVQXRPTQVQL:EPLP-AA¹⁷-VYY, KIPKAXXVSQEL:EPLT-AA¹⁷-LYY, GIPEPXXVSQKM:EPLT-AA¹⁷-LYY, SIPKAXXVSQEL:EPLT-AA¹⁷-LYY, HVTKPTXVSQKL:EPLT-AA¹⁷-LYY, YVPKPXXVSQKL:EPLT-AA¹⁷-LYY, TVPKPXXVSQQL:EPLT-AA¹⁷-LYY, AVPKAXXVSQKL:EPLT-AA¹⁷-LYY, KVGKAXXVSQKL:EPLT-AA¹⁷-LYY, KASKAXXVSQKL:EPLT-AA¹⁷-LYY, GSAGPXXVSQKM:EPLT-AA¹⁷-LYY, AAPASXXVSQRL:EPLT-AA¹⁷-LYY, STPPTXXVSQRL:EPLT-AA¹⁷-LYY, HVPKPXXVSQKL:EPLT-AA¹⁷-LYY, RVPSTXXVSQKT:EPLT-AA¹⁷-LYY, ASAAPXXVSQAL:EPLT-AA¹⁷-LYY, ASASPXXVSQDL:EPLT-AA¹⁷-LYY, KIPKAXXVPTEL:EPLT-AA¹⁷-LYY, GIPEPXXVPEKM:EPLT-AA¹⁷-LYY, SIPKAXXVPTEL:EPLT-AA¹⁷-LYY, HVTKPTXAPTKL:EPLT-AA¹⁷-LYY, YVPKPXXAPTKL:EPLT-AA¹⁷-LYY, TVPKPXXAPTQL:EPLT-AA¹⁷-LYY, AVPKAXXAPTKL:EPLT-AA¹⁷-LYY, KVGKAXXVPTKL:EPLT-AA¹⁷-LYY, KASKAXXVPTKL:EPLT-AA¹⁷-LYY, GSAGPXXTPTKM:EPLT-AA¹⁷-LYY, AAPASXXVPARL:EPLT-AA¹⁷-LYY, STPPTXXVPTRL:EPLT-AA¹⁷-LYY, HVPKPXXAPTKL:EPLT-AA¹⁷-LYY, RVPSTXXAPVKT:EPLT-AA¹⁷-LYY, ASAAPXXVPQAL:EPLT-AA¹⁷-LYY, NDEGLEXVPTEE:EPLT-AA¹⁷-LYY, NDEGLEXVPTGQ:EPLT-AA¹⁷-LYY, SSVKXQPSRVHH:EPLT-AA¹⁷-LYY, RNVQXRPTQVQL:EPLT-AA¹⁷-LYY, KIPKAXXVPQEL:EPLT-AA¹⁷-LYY, GIPEPXXVPQKM:EPLT-AA¹⁷-LYY, SIPKAXXVPQEL:EPLT-AA¹⁷-LYY, HVTKPTXVPQKL:EPLT-AA¹⁷-LYY, YVPKPXXVPQKL:EPLT-AA¹⁷-LYY, TVPKPXXVPQQL:EPLT-AA¹⁷-LYY, AVPKAXXVPQKL:EPLT-AA¹⁷-LYY, KVGKAXXVPQKL:EPLT-AA¹⁷-LYY, KASKAXXVPQKL:EPLT-AA¹⁷-LYY, GSAGPXXVPQKM:EPLT-AA¹⁷-LYY, AAPASXXVPQRL:EPLT-AA¹⁷-LYY, STPPTXXVPQRL:EPLT-AA¹⁷-LYY, HVPKPXXVPQKL:EPLT-AA¹⁷-LYY, RVPSTXXVPQKT:EPLT-AA¹⁷-LYY, ASASPXXVPQDL:EPLT-AA¹⁷-LYY, NDEGLEXVPTGQ:SNIT-AA¹⁷-QIM, GIPEPXXVPEKM:SNIT-AA¹⁷-QIM, HVTKPTXAPTKL:SNIT-AA¹⁷-QIM, YVPKPXXAPTKL:SNIT-AA¹⁷-QIM, TVPKPXXAPTQL:SNIT-AA¹⁷-QIM, AVPKAXXAPTKL:SNIT-AA¹⁷-QIM, GSAGPXXTPTKM:SNIT-AA¹⁷-QIM, AAPASXXVPARL:SNIT-AA¹⁷-QIM, HVPKPXXAPTKL:SNIT-AA¹⁷-QIM, RVPSTXXAPVKT:SNIT-AA¹⁷-QIM, ASAAPXXVPQAL:SNIT-AA¹⁷-QIM, ASASPXXVSQDL:SNIT-AA¹⁷-QIM, ASASPXXVPQDL:SNIT-AA¹⁷-QIM, SSVKXQPSRVHH:SNIT-AA¹⁷-QIM, RNVQXRPTQVQL:SNIT-AA¹⁷-QIM, RNVQXRPSRVQL:RSVK-AA¹⁷-AKV, KIPKAXXVPTEL:RSVK-AA¹⁷-AKV, GIPEPXXVPEKM:RSVK-AA¹⁷-AKV, SIPKAXXVPTEL:RSVK-AA¹⁷-AKV, HVTKPTXAPTKL:RSVK-AA¹⁷-AKV, YVPKPXXAPTKL:RSVK-AA¹⁷-AKV, TVPKPXXAPTQL:RSVK-AA¹⁷-AKV, AVPKAXXAPTKL:RSVK-AA¹⁷-AKV, KVGKAXXVPTKL:RSVK-AA¹⁷-AKV, KASKAXXVPTKL:RSVK-AA¹⁷-AKV, GSAGPXXTPTKM:RSVK-AA¹⁷-AKV, AAPASXXVPARL:RSVK-AA¹⁷-AKV, STPPTXXVPTRL:RSVK-AA¹⁷-AKV, HVPKPXXAPTKL:RSVK-AA¹⁷-AKV, RVPSTXXAPVKT:RSVK-AA¹⁷-AKV, ASAAPXXVPQAL:RSVK-AA¹⁷-AKV, ASASPXXVSQDL:RSVK-AA¹⁷-AKV, ASASPXXVPQDL:RSVK-AA¹⁷-AKV, NDEGLEXVPTEE:RSVK-AA¹⁷-AKV, NDEGLEXVPTGQ:RSVK-AA¹⁷-AKV, RNVQXRPTQVQL:RSVK-AA¹⁷-AKV, SSVKXQPTQVHH:RPVQ-AA¹⁷-RKI, KIPKAXXVPTEL:RPVQ-AA¹⁷-RKI, GIPEPXXVPEKM:RPVQ-AA¹⁷-RKI, SIPKAXXVPTEL:RPVQ-AA¹⁷-RKI, HVTKPTXAPTKL:RPVQ-AA¹⁷-RKI, YVPKPXXAPTKL:RPVQ-AA¹⁷-RKI, TVPKPXXAPTQL:RPVQ-AA¹⁷-RKI, AVPKAXXAPTKL:RPVQ-AA¹⁷-RKI, KVGKAXXVPTKL:RPVQ-AA¹⁷-RKI, KASKAXXVPTKL:RPVQ-AA¹⁷-RKI, GSAGPXXTPTKM:RPVQ-AA¹⁷-RKI, AAPASXXVPARL:RPVQ-AA¹⁷-RKI, STPPTXXVPTRL:RPVQ-AA¹⁷-RKI, HVPKPXXAPTKL:RPVQ-AA¹⁷-RKI, RVPSTXXAPVKT:RPVQ-AA¹⁷-RKI, ASAAPXXVPQAL:RPVQ-AA¹⁷-RKI, ASASPXXVSQDL:RPVQ-AA¹⁷-RKI, ASASPXXVPQDL:RPVQ-AA¹⁷-RKI, NDEGLEXVPTEE:RPVQ-AA¹⁷-RKI, NDEGLEXVPTGQ:RPVQ-AA¹⁷-RKI and SSVKXQPSRVHH:RPVQ-AA¹⁷-RKI; and wherein AA¹⁷ is selected from the group consisting of G, A, V, L, I, P, F, M, W, T and S (in particular is selected from the group consisting of M, I, L, V and T).

[0409] In certain embodiments, the triplet PEP7:PEP3:PEP1 is selected from the group consisting of

GIPEPXX:VPT:SAIS, HVTKPTX:VPT:SAIS,
YVPKPXX:VPT:SAIS, TVPKPXX:VPT:SAIS,
AVPKAXX:VPT:SAIS, KVGKAXX:VPT:SAIS,
KASKAXX:VPT:SAIS, GSAGPXX:VPT:SAIS,
AAPASXX:VPT:SAIS, STPPTXX:VPT:SAIS,
HVPKPXX:VPT:SAIS, RVPSTXX:VPT:SAIS,
ASAAPXX:VPT:SAIS, ASASPXX:VPT:SAIS,
GIPEPXX:VPE:SAIS, HVTKPTX:APT:SAIS,
YVPKPXX:APT:SAIS, TVPKPXX:APT:SAIS,
AVPKAXX:APT:SAIS, GSAGPXX:TPT:SAIS,
AAPASXX:VPA:SAIS, HVPKPXX:APT:SAIS,
RVPSTXX:APV:SAIS, ASAAPXX:VPQ:SAIS,
ASASPXX:VSQ:SAIS, ASASPXX:VPQ:SAIS,
SSVKXQP:SRV:SAIS, RNVQXRP:TQV:SAIS,
KIPKAXX:VPE:SSLS, SIPKAXX:VPE:SSLS,
HVTKPTX:VPE:SSLS, YVPKPXX:VPE:SSLS,
TVPKPXX:VPE:SSLS, AVPKAXX:VPE:SSLS,
KVGKAXX:VPE:SSLS, KASKAXX:VPE:SSLS,
GSAGPXX:VPE:SSLS, AAPASXX:VPE:SSLS,
STPPTXX:VPE:SSLS, HVPKPXX:VPE:SSLS,
RVPSTXX:VPE:SSLS, ASAAPXX:VPE:SSLS,
ASASPXX:VPE:SSLS, KIPKAXX:VPT:SSLS,
SIPKAXX:VPT:SSLS, HVTKPTX:APT:SSLS,
YVPKPXX:APT:SSLS, TVPKPXX:APT:SSLS,
AVPKAXX:APT:SSLS, KVGKAXX:VPT:SSLS,
KASKAXX:VPT:SSLS, GSAGPXX:TPT:SSLS,
AAPASXX:VPA:SSLS, STPPTXX:VPT:SSLS,
HVPKPXX:APT:SSLS, RVPSTXX:APV:SSLS,
ASAAPXX:VPQ:SSLS, ASASPXX:VSQ:SSLS,
ASASPXX:VPQ:SSLS, NDEGLEX:VPT:SSLS,
SSVKXQP:SRV:SSLS, RNVQXRP:TQV:SSLS,
KIPKAXX:APT:NAIS, GIPEPXX:APT:NAIS,
SIPKAXX:APT:NAIS, AVPKAXX:APT:NAIS,
KVGKAXX:APT:NAIS, KASKAXX:APT:NAIS,
GSAGPXX:APT:NAIS, AAPASXX:APT:NAIS,
STPPTXX:APT:NAIS, RVPSTXX:APT:NAIS,
ASAAPXX:APT:NAIS, ASASPXX:APT:NAIS,
KIPKAXX:VPT:NAIS, GIPEPXX:VPE:NAIS,
SIPKAXX:VPT:NAIS, KVGKAXX:VPT:NAIS,
KASKAXX:VPT:NAIS, GSAGPXX:TPT:NAIS,
AAPASXX:VPA:NAIS, STPPTXX:VPT:NAIS,
RVPSTXX:APV:NAIS, ASAAPXX:VPQ:NAIS,
ASASPXX:VSQ:NAIS, ASASPXX:VPQ:NAIS,
NDEGLEX:VPT:NAIS, SSVKXQP:SRV:NAIS,
RNVQXRP:TQV:NAIS, KIPKAXX:APT:SATS,
GIPEPXX:APT:SATS, SIPKAXX:APT:SATS,
HVTKPTX:APT:SATS, YVPKPXX:APT:SATS,
TVPKPXX:APT:SATS, KVGKAXX:APT:SATS,
KASKAXX:APT:SATS, GSAGPXX:APT:SATS,
AAPASXX:APT:SATS, STPPTXX:APT:SATS,
HVPKPXX:APT:SATS, RVPSTXX:APT:SATS,
ASAAPXX:APT:SATS, ASASPXX:APT:SATS,
KIPKAXX:VPT:SATS, GIPEPXX:VPE:SATS,
SIPKAXX:VPT:SATS, KVGKAXX:VPT:SATS,
KASKAXX:VPT:SATS, GSAGPXX:TPT:SATS,
AAPASXX:VPA:SATS, STPPTXX:VPT:SATS,
RVPSTXX:APV:SATS, ASAAPXX:VPQ:SATS,
ASASPXX:VSQ:SATS, ASASPXX:VPQ:SATS,
NDEGLEX:VPT:SATS, SSVKXQP:SRV:SATS,
RNVQXRP:TQV:SATS, KIPKAXX:VPT:SPIS,
GIPEPXX:VPT:SPIS, SIPKAXX:VPT:SPIS,
HVTKPTX:VPT:SPIS, YVPKPXX:VPT:SPIS,
TVPKPXX:VPT:SPIS, AVPKAXX:VPT:SPIS,
KASKAXX:VPT:SPIS, GSAGPXX:VPT:SPIS,
AAPASXX:VPT:SPIS, STPPTXX:VPT:SPIS,
HVPKPXX:VPT:SPIS, RVPSTXX:VPT:SPIS,
ASAAPXX:VPT:SPIS, ASASPXX:VPT:SPIS,
GIPEPXX:VPE:SPIS, HVTKPTX:APT:SPIS,
YVPKPXX:APT:SPIS, TVPKPXX:APT:SPIS,
AVPKAXX:APT:SPIS, GSAGPXX:TPT:SPIS,
AAPASXX:VPA:SPIS, HVPKPXX:APT:SPIS,
RVPSTXX:APV:SPIS, ASAAPXX:VPQ:SPIS,
ASASPXX:VSQ:SPIS, ASASPXX:VPQ:SPIS,
SSVKXQP:SRV:SPIS, RNVQXRP:TQV:SPIS,
KIPKAXX:VPT:EPIS, GIPEPXX:VPT:EPIS,
SIPKAXX:VPT:EPIS, HVTKPTX:VPT:EPIS,
YVPKPXX:VPT:EPIS, TVPKPXX:VPT:EPIS,
AVPKAXX:VPT:EPIS, KVGKAXX:VPT:EPIS,
GSAGPXX:VPT:EPIS, AAPASXX:VPT:EPIS,
STPPTXX:VPT:EPIS, HVPKPXX:VPT:EPIS,
RVPSTXX:VPT:EPIS, ASAAPXX:VPT:EPIS,
ASASPXX:VPT:EPIS, GIPEPXX:VPE:EPIS,
HVTKPTX:APT:EPIS, YVPKPXX:APT:EPIS,
TVPKPXX:APT:EPIS, AVPKAXX:APT:EPIS,
GSAGPXX:TPT:EPIS, AAPASXX:VPA:EPIS,
HVPKPXX:APT:EPIS, RVPSTXX:APV:EPIS,
ASAAPXX:VPQ:EPIS, ASASPXX:VSQ:EPIS,
ASASPXX:VPQ:EPIS, SSVKXQP:SRV:EPIS,
RNVQXRP:TQV:EPIS, KIPKAXX:TPT:SPIN,
GIPEPXX:TPT:SPIN, SIPKAXX:TPT:SPIN,
HVTKPTX:TPT:SPIN, YVPKPXX:TPT:SPIN,
TVPKPXX:TPT:SPIN, AVPKAXX:TPT:SPIN,
KVGKAXX:TPT:SPIN, KASKAXX:TPT:SPIN,
AAPASXX:TPT:SPIN, STPPTXX:TPT:SPIN,
HVPKPXX:TPT:SPIN, RVPSTXX:TPT:SPIN,
ASAAPXX:TPT:SPIN, ASASPXX:TPT:SPIN,
KIPKAXX:VPT:SPIN, GIPEPXX:VPE:SPIN,
SIPKAXX:VPT:SPIN, HVTKPTX:APT:SPIN,
YVPKPXX:APT:SPIN, TVPKPXX:APT:SPIN,
AVPKAXX:APT:SPIN, KVGKAXX:VPT:SPIN,
KASKAXX:VPT:SPIN, AAPASXX:VPA:SPIN,
STPPTXX:VPT:SPIN, HVPKPXX:APT:SPIN,
RVPSTXX:APV:SPIN, ASAAPXX:VPQ:SPIN,
ASASPXX:VSQ:SPIN, ASASPXX:VPQ:SPIN,
NDEGLEX:VPT:SPIN, SSVKXQP:SRV:SPIN,
RNVQXRP:TQV:SPIN, KIPKAXX:VPA:SPIS,
GIPEPXX:VPA:SPIS, SIPKAXX:VPA:SPIS,
HVTKPTX:VPA:SPIS, YVPKPXX:VPA:SPIS,
TVPKPXX:VPA:SPIS, AVPKAXX:VPA:SPIS,
KVGKAXX:VPA:SPIS, KASKAXX:VPA:SPIS,
GSAGPXX:VPA:SPIS, STPPTXX:VPA:SPIS,
HVPKPXX:VPA:SPIS, RVPSTXX:VPA:SPIS,
ASAAPXX:VPA:SPIS, ASASPXX:VPA:SPIS,
KVGKAXX:VPT:SPIS, NDEGLEX:VPT:SPIS,
KIPKAXX:APV:KPLS, GIPEPXX:APV:KPLS,
SIPKAXX:APV:KPLS, HVTKPTX:APV:KPLS,
YVPKPXX:APV:KPLS, TVPKPXX:APV:KPLS,
AVPKAXX:APV:KPLS, KVGKAXX:APV:KPLS,
KASKAXX:APV:KPLS, GSAGPXX:APV:KPLS,
AAPASXX:APV:KPLS, STPPTXX:APV:KPLS,
HVPKPXX:APV:KPLS, ASAAPXX:APV:KPLS,
ASASPXX:APV:KPLS, KIPKAXX:VPT:KPLS,
GIPEPXX:VPE:KPLS, SIPKAXX:VPT:KPLS,
HVTKPTX:APT:KPLS, YVPKPXX:APT:KPLS,
TVPKPXX:APT:KPLS, AVPKAXX:APT:KPLS,
KVGKAXX:VPT:KPLS, KASKAXX:VPT:KPLS,
GSAGPXX:TPT:KPLS, AAPASXX:VPA:KPLS,
STPPTXX:VPT:KPLS, HVPKPXX:APT:KPLS,
ASAAPXX:VPQ:KPLS, ASASPXX:VSQ:KPLS,
ASASPXX:VPQ:KPLS, NDEGLEX:VPT:KPLS,
SSVKXQP:SRV:KPLS, RNVQXRP:TQV:KPLS,
KIPKAXX:VPQ:EPLP, GIPEPXX:VPQ:EPLP,
SIPKAXX:VPQ:EPLP, HVTKPTX:VPQ:EPLP,
YVPKPXX:VPQ:EPLP, TVPKPXX:VPQ:EPLP,
AVPKAXX:VPQ:EPLP, KVGKAXX:VPQ:EPLP,
KASKAXX:VPQ:EPLP, GSAGPXX:VPQ:EPLP,
AAPASXX:VPQ:EPLP, STPPTXX:VPQ:EPLP,
HVPKPXX:VPQ:EPLP, RVPSTXX:VPQ:EPLP,
ASASPXX:VPQ:EPLP, KIPKAXX:VPT:EPLP,
GIPEPXX:VPE:EPLP, SIPKAXX:VPT:EPLP,
HVTKPTX:APT:EPLP, YVPKPXX:APT:EPLP,
TVPKPXX:APT:EPLP, AVPKAXX:APT:EPLP,
KVGKAXX:VPT:EPLP, KASKAXX:VPT:EPLP,
GSAGPXX:TPT:EPLP, AAPASXX:VPA:EPLP,
STPPTXX:VPT:EPLP, HVPKPXX:APT:EPLP,
RVPSTXX:APV:EPLP, ASASPXX:VSQ:EPLP,
NDEGLEX:VPT:EPLP, SSVKXQP:SRV:EPLP,
RNVQXRP:TQV:EPLP, KIPKAXX:VSQ:EPLT,
GIPEPXX:VSQ:EPLT, SIPKAXX:VSQ:EPLT,
HVTKPTX:VSQ:EPLT, YVPKPXX:VSQ:EPLT,
TVPKPXX:VSQ:EPLT, AVPKAXX:VSQ:EPLT,
KVGKAXX:VSQ:EPLT, KASKAXX:VSQ:EPLT,
GSAGPXX:VSQ:EPLT, AAPASXX:VSQ:EPLT,
STPPTXX:VSQ:EPLT, HVPKPXX:VSQ:EPLT,
RVPSTXX:VSQ:EPLT, ASAAPXX:VSQ:EPLT,
ASASPXX:VSQ:EPLT, KIPKAXX:VPT:EPLT,
GIPEPXX:VPE:EPLT, SIPKAXX:VPT:EPLT,
HVTKPTX:APT:EPLT, YVPKPXX:APT:EPLT,
TVPKPXX:APT:EPLT, AVPKAXX:APT:EPLT,
KVGKAXX:VPT:EPLT, KASKAXX:VPT:EPLT,
GSAGPXX:TPT:EPLT, AAPASXX:VPA:EPLT,
STPPTXX:VPT:EPLT, HVPKPXX:APT:EPLT,
RVPSTXX:APV:EPLT, ASAAPXX:VPQ:EPLT,
NDEGLEX:VPT:EPLT, SSVKXQP:SRV:EPLT,
RNVQXRP:TQV:EPLT, KIPKAXX:VPQ:EPLT,
GIPEPXX:VPQ:EPLT, SIPKAXX:VPQ:EPLT,
HVTKPTX:VPQ:EPLT, YVPKPXX:VPQ:EPLT,
TVPKPXX:VPQ:EPLT, AVPKAXX:VPQ:EPLT,
KVGKAXX:VPQ:EPLT, KASKAXX:VPQ:EPLT,
GSAGPXX:VPQ:EPLT, AAPASXX:VPQ:EPLT,
STPPTXX:VPQ:EPLT, HVPKPXX:VPQ:EPLT,
RVPSTXX:VPQ:EPLT, ASASPXX:VPQ:EPLT,
NDEGLEX:VPT:SNIT, GIPEPXX:VPE:SNIT,
HVTKPTX:APT:SNIT, YVPKPXX:APT:SNIT,
TVPKPXX:APT:SNIT, AVPKAXX:APT:SNIT,
GSAGPXX:TPT:SNIT, AAPASXX:VPA:SNIT,
HVPKPXX:APT:SNIT, RVPSTXX:APV:SNIT,
ASAAPXX:VPQ:SNIT, ASASPXX:VSQ:SNIT,
ASASPXX:VPQ:SNIT, SSVKXQP:SRV:SNIT,
RNVQXRP:TQV:SNIT, RNVQXRP:SRV:RSVK,
KIPKAXX:VPT:RSVK, GIPEPXX:VPE:RSVK,
SIPKAXX:VPT:RSVK, HVTKPTX:APT:RSVK,
YVPKPXX:APT:RSVK, TVPKPXX:APT:RSVK,
AVPKAXX:APT:RSVK, KVGKAXX:VPT:RSVK,
KASKAXX:VPT:RSVK, GSAGPXX:TPT:RSVK,
AAPASXX:VPA:RSVK, STPPTXX:VPT:RSVK,
HVPKPXX:APT:RSVK, RVPSTXX:APV:RSVK,
ASAAPXX:VPQ:RSVK, ASASPXX:VSQ:RSVK,
ASASPXX:VPQ:RSVK, NDEGLEX:VPT:RSVK,
RNVQXRP:TQV:RSVK, SSVKXQP:TQV:RPVQ,
KIPKAXX:VPT:RPVQ, GIPEPXX:VPE:RPVQ,
SIPKAXX:VPT:RPVQ, HVTKPTX:APT:RPVQ,
YVPKPXX:APT:RPVQ, TVPKPXX:APT:RPVQ,
AVPKAXX:APT:RPVQ, KVGKAXX:VPT:RPVQ,
KASKAXX:VPT:RPVQ, GSAGPXX:TPT:RPVQ,
AAPASXX:VPA:RPVQ, STPPTXX:VPT:RPVQ,
HVPKPXX:APT:RPVQ, RVPSTXX:APV:RPVQ,
ASAAPXX:VPQ:RPVQ, ASASPXX:VSQ:RPVQ,
ASASPXX:VPQ:RPVQ, NDEGLEX:VPT:RPVQ
and
SSVKXQP:SRV:RPVQ.

[0410] In certain embodiments, the triplet PEP7:PEP3:PEP12 is selected from the group consisting of GIPEPXX:VPT:SAIS-AA¹⁷-LYL, HVTKPTX:VPT:SAIS-AA¹⁷-LYL, YVPKPXX:VPT:SAIS-AA¹⁷-LYL, TVPKPXX:VPT:SAIS-AA¹⁷-LYL, AVPKAXX:VPT:SAIS-AA¹⁷-LYL, KVGKAXX:VPT:SAIS-AA¹⁷-LYL, KASKAXX:VPT:SAIS-AA¹⁷-LYL, GSAGPXX:VPT:SAIS-AA¹⁷-LYL, AAPASXX:VPT:SAIS-AA¹⁷-LYL, STPPTXX:VPT:SAIS-AA¹⁷-LYL, HVPKPXX:VPT:SAIS-AA¹⁷-LYL, RVPSTXX:VPT:SAIS-AA¹⁷-LYL, ASAAPXX:VPT:SAIS-AA¹⁷-LYL, ASASPXX:VPT:SAIS-AA¹⁷-LYL, GIPEPXX:VPE:SAIS-AA¹⁷-LYL, HVTKPTX:APT:SAIS-AA¹⁷-LYL, YVPKPXX:APT:SAIS-AA¹⁷-LYL, TVPKPXX:APT:SAIS-AA¹⁷-LYL, AVPKAXX:APT:SAIS-AA¹⁷-LYL, GSAGPXX:TPT:SAIS-AA¹⁷-LYL, AAPASXX:VPA:SAIS-AA¹⁷-LYL, HVPKPXX:APT:SAIS-AA¹⁷-LYL, RVPSTXX:APV:SAIS-AA¹⁷-LYL, ASAAPXX:VPQ:SAIS-AA¹⁷-LYL, ASASPXX:VSQ:SAIS-AA¹⁷-LYL, ASASPXX:VPQ:SAIS-AA¹⁷-LYL, SSVKXQP:SRV:SAIS-AA¹⁷-LYL, RNVQXRP:TQV:SAIS-AA¹⁷-LYL, KIPKAXX:VPE:SSLS-AA¹⁷-LFF, SIPKAXX:VPE:SSLS-AA¹⁷-LFF, HVTKPTX:VPE:SSLS-AA¹⁷-LFF, YVPKPXX:VPE:SSLS-AA¹⁷-LFF, TVPKPXX:VPE:SSLS-AA¹⁷-LFF, AVPKAXX:VPE:SSLS-AA¹⁷-LFF, KVGKAXX:VPE:SSLS-AA¹⁷-LFF, KASKAXX:VPE:SSLS-AA¹⁷-LFF, GSAGPXX:VPE:SSLS-AA¹⁷-LFF, AAPASXX:VPE:SSLS-AA¹⁷-LFF, STPPTXX:VPE:SSLS-AA¹⁷-LFF, HVPKPXX:VPE:SSLS-AA¹⁷-LFF, RVPSTXX:VPE:SSLS-AA¹⁷-LFF, ASAAPXX:VPE:SSLS-AA¹⁷-LFF, ASASPXX:VPE:SSLS-AA¹⁷-LFF, KIPKAXX:VPT:SSLS-AA¹⁷-LFF, SIPKAXX:VPT:SSLS-AA¹⁷-LFF, HVTKPTX:APT:SSLS-AA¹⁷-LFF, YVPKPXX:APT:SSLS-AA¹⁷-LFF, TVPKPXX:APT:SSLS-AA¹⁷-LFF, AVPKAXX:APT:SSLS-AA¹⁷-LFF, KVGKAXX:VPT:SSLS-AA¹⁷-LFF, KASKAXX:VPT:SSLS-AA¹⁷-LFF, GSAGPXX:TPT:SSLS-AA¹⁷-LFF, AAPASXX:VPA:SSLS-AA¹⁷-LFF, STPPTXX:VPT:SSLS-AA¹⁷-LFF, HVPKPXX:APT:SSLS-AA¹⁷-LFF, RVPSTXX:APV:SSLS-AA¹⁷-LFF, ASAAPXX:VPQ:SSLS-AA¹⁷-LFF, ASASPXX:VSQ:SSLS-AA¹⁷-LFF, ASASPXX:VPQ:SSLS-AA¹⁷-LFF, NDEGLEX:VPT:SSLS-AA¹⁷-LFF, SSVKXQP:SRV:SSLS-AA¹⁷-LFF, RNVQXRP:TQV:SSLS-AA¹⁷-LFF, KIPKAXX:APT:NAIS-AA¹⁷-LYF, GIPEPXX:APT:NAIS-AA¹⁷-LYF, SIPKAXX:APT:NAIS-AA¹⁷-LYF, AVPKAXX:APT:NAIS-AA¹⁷-LYF, KVGKAXX:APT:NAIS-AA¹⁷-LYF, KASKAXX:APT:NAIS-AA¹⁷-LYF, GSAGPXX:APT:NAIS-AA¹⁷-LYF, AAPASXX:APT:NAIS-AA¹⁷-LYF, STPPTXX:APT:NAIS-AA¹⁷-LYF, RVPSTXX:APT:NAIS-AA¹⁷-LYF, ASAAPXX:APT:NAIS-AA¹⁷-LYF, ASASPXX:APT:NAIS-AA¹⁷-LYF, KIPKAXX:VPT:NAIS-AA¹⁷-LYF, GIPEPXX:VPE:NAIS-AA¹⁷-LYF, SIPKAXX:VPT:NAIS-AA¹⁷-LYF, KVGKAXX:VPT:NAIS-AA¹⁷-LYF, KASKAXX:VPT:NAIS-AA¹⁷-LYF, GSAGPXX:TPT:NAIS-AA¹⁷-LYF, AAPASXX:VPA:NAIS-AA¹⁷-LYF, STPPTXX:VPT:NAIS-AA¹⁷-LYF, RVPSTXX:APV:NAIS-AA¹⁷-LYF, ASAAPXX:VPQ:NAIS-AA¹⁷-LYF, ASASPXX:VSQ:NAIS-AA¹⁷-LYF, ASASPXX:VPQ:NAIS-AA¹⁷-LYF, NDEGLEX:VPT:NAIS-AA¹⁷-LYF, SSVKXQP:SRV:NAIS-AA¹⁷-LYF, RNVQXRP:TQV:NAIS-AA¹⁷-LYF, KIPKAXX:APT:SATS-AA¹⁷-LYY, GIPEPXX:APT:SATS-AA¹⁷-LYY, SIPKAXX:APT:SATS-AA¹⁷-LYY, HVTKPTX:APT:SATS-AA¹⁷-LYY, YVPKPXX:APT:SATS-AA¹⁷-LYY, TVPKPXX:APT:SATS-AA¹⁷-LYY, KVGKAXX:APT:SATS-AA¹⁷-LYY, KASKAXX:APT:SATS-AA¹⁷-LYY, GSAGPXX:APT:SATS-AA¹⁷-LYY, AAPASXX:APT:SATS-AA¹⁷-LYY, STPPTXX:APT:SATS-AA¹⁷-LYY, HVPKPXX:APT:SATS-AA¹⁷-LYY, RVPSTXX:APT:SATS-AA¹⁷-LYY, ASAAPXX:APT:SATS-AA¹⁷-LYY, ASASPXX:APT:SATS-AA¹⁷-LYY, KIPKAXX:VPT:SATS-AA¹⁷-LYY, GIPEPXX:VPE:SATS-AA¹⁷-LYY, SIPKAXX:VPT:SATS-AA¹⁷-LYY, KVGKAXX:VPT:SATS-AA¹⁷-LYY, KASKAXX:VPT:SATS-AA¹⁷-LYY, GSAGPXX:TPT:SATS-AA¹⁷-LYY, AAPASXX:VPA:SATS-AA¹⁷-LYY, STPPTXX:VPT:SATS-AA¹⁷-LYY, RVPSTXX:APV:SATS-AA¹⁷-LYY, ASAAPXX:VPQ:SATS-AA¹⁷-LYY, ASASPXX:VSQ:SATS-AA¹⁷-LYY, ASASPXX:VPQ:SATS-AA¹⁷-LYY, NDEGLEX:VPT:SATS-AA¹⁷-LYY, SSVKXQP:SRV:SATS-AA¹⁷-LYY, RNVQXRP:TQV:SATS-AA¹⁷-LYY, KIPKAXX:VPT:SPIS-AA¹⁷-LYK, GIPEPXX:VPT:SPIS-AA¹⁷-LYK, SIPKAXX:VPT:SPIS-AA¹⁷-LYK, HVTKPTX:VPT:SPIS-AA¹⁷-LYK, YVPKPXX:VPT:SPIS-AA¹⁷-LYK, TVPKPXX:VPT:SPIS-AA¹⁷-LYK, AVPKAXX:VPT:SPIS-AA¹⁷-LYK, KASKAXX:VPT:SPIS-AA¹⁷-LYK, GSAGPXX:VPT:SPIS-AA¹⁷-LYK, AAPASXX:VPT:SPIS-AA¹⁷-LYK, STPPTXX:VPT:SPIS-AA¹⁷-LYK, HVPKPXX:VPT:SPIS-AA¹⁷-LYK, RVPSTXX:VPT:SPIS-AA¹⁷-LYK, ASAAPXX:VPT:SPIS-AA¹⁷-LYK, ASASPXX:VPT:SPIS-AA¹⁷-LYK, GIPEPXX:VPE:SPIS-AA¹⁷-LYK, HVTKPTX:APT:SPIS-AA¹⁷-LYK, YVPKPXX:APT:SPIS-AA¹⁷-LYK, TVPKPXX:APT:SPIS-AA¹⁷-LYK, AVPKAXX:APT:SPIS-AA¹⁷-LYK, GSAGPXX:TPT:SPIS-AA¹⁷-LYK, AAPASXX:VPA:SPIS-AA¹⁷-LYK, HVPKPXX:APT:SPIS-AA¹⁷-LYK, RVPSTXX:APV:SPIS-AA¹⁷-LYK, ASAAPXX:VPQ:SPIS-AA¹⁷-LYK, ASASPXX:VSQ:SPIS-AA¹⁷-LYK, ASASPXX:VPQ:SPIS-AA¹⁷-LYK, SSVKXQP:SRV:SPIS-AA¹⁷-LYK, RNVQXRP:TQV:SPIS-AA¹⁷-LYK, KIPKAXX:VPT:EPIS-AA¹⁷-LYL, GIPEPXX:VPT:EPIS-AA¹⁷-LYL, SIPKAXX:VPT:EPIS-AA¹⁷-LYL, HVTKPTX:VPT:EPIS-AA¹⁷-LYL, YVPKPXX:VPT:EPIS-AA¹⁷-LYL, TVPKPXX:VPT:EPIS-AA¹⁷-LYL, AVPKAXX:VPT:EPIS-AA¹⁷-LYL, KVGKAXX:VPT:EPIS-AA¹⁷-LYL, GSAGPXX:VPT:EPIS-AA¹⁷-LYL, AAPASXX:VPT:EPIS-AA¹⁷-LYL, STPPTXX:VPT:EPIS-AA¹⁷-LYL, HVPKPXX:VPT:EPIS-AA¹⁷-LYL, RVPSTXX:VPT:EPIS-AA¹⁷-LYL, ASAAPXX:VPT:EPIS-AA¹⁷-LYL, ASASPXX:VPT:EPIS-AA¹⁷-LYL, GIPEPXX:VPE:EPIS-AA¹⁷-LYL, HVTKPTX:APT:EPIS-AA¹⁷-LYL, YVPKPXX:APT:EPIS-AA¹⁷-LYL, TVPKPXX:APT:EPIS-AA¹⁷-LYL, AVPKAXX:APT:EPIS-AA¹⁷-LYL, GSAGPXX:TPT:EPIS-AA¹⁷-LYL, AAPASXX:VPA:EPIS-AA¹⁷-LYL, HVPKPXX:APT:EPIS-AA¹⁷-LYL, RVPSTXX:APV:EPIS-AA¹⁷-LYL, ASAAPXX:VPQ:EPIS-AA¹⁷-LYL, ASASPXX:VSQ:EPIS-AA¹⁷-LYL, ASASPXX:VPQ:EPIS-AA¹⁷-LYL, SSVKXQP:SRV:EPIS-AA¹⁷-LYL, RNVQXRP:TQV:EPIS-AA¹⁷-LYL, KIPKAXX:TPT:SPIN-AA¹⁷-LYF, GIPEPXX:TPT:SPIN-AA¹⁷-LYF, SIPKAXX:TPT:SPIN-AA¹⁷-LYF, HVTKPTX:TPT:SPIN-AA¹⁷-LYF, YVPKPXX:TPT:SPIN-AA¹⁷-LYF, TVPKPXX:TPT:SPIN-AA¹⁷-LYF, AVPKAXX:TPT:SPIN-AA¹⁷-LYF, KVGKAXX:TPT:SPIN-AA¹⁷-LYF, KASKAXX:TPT:SPIN-AA¹⁷-LYF, AAPASXX:TPT:SPIN-AA¹⁷-LYF, STPPTXX:TPT:SPIN-AA¹⁷-LYF, HVPKPXX:TPT:SPIN-AA¹⁷-LYF, RVPSTXX:TPT:SPIN-AA¹⁷-LYF, ASAAPXX:TPT:SPIN-AA¹⁷-LYF, ASASPXX:TPT:SPIN-AA¹⁷-LYF, KIPKAXX:VPT:SPIN-AA¹⁷-LYF, GIPEPXX:VPE:SPIN-AA¹⁷-LYF, SIPKAXX:VPT:SPIN-AA¹⁷-LYF, HVTKPTX:APT:SPIN-AA¹⁷-LYF, YVPKPXX:APT:SPIN-AA¹⁷-LYF, TVPKPXX:APT:SPIN-AA¹⁷-LYF, AVPKAXX:APT:SPIN-AA¹⁷-LYF, KVGKAXX:VPT:SPIN-AA¹⁷-LYF, KASKAXX:VPT:SPIN-AA¹⁷-LYF, AAPASXX:VPA:SPIN-AA¹⁷-LYF, STPPTXX:VPT:SPIN-AA¹⁷-LYF, HVPKPXX:APT:SPIN-AA¹⁷-LYF, RVPSTXX:APV:SPIN-AA¹⁷-LYF, ASAAPXX:VPQ:SPIN-AA¹⁷-LYF, ASASPXX:VSQ:SPIN-AA¹⁷-LYF, ASASPXX:VPQ:SPIN-AA¹⁷-LYF, NDEGLEX:VPT:SPIN-AA¹⁷-LYF, SSVKXQP:SRV:SPIN-AA¹⁷-LYF, RNVQXRP:TQV:SPIN-AA¹⁷-LYF, KIPKAXX:VPA:SPIS-AA¹⁷-LYI, GIPEPXX:VPA:SPIS-AA¹⁷-LYI, SIPKAXX:VPA:SPIS-AA¹⁷-LYI, HVTKPTX:VPA:SPIS-AA¹⁷-LYI, YVPKPXX:VPA:SPIS-AA¹⁷-LYI, TVPKPXX:VPA:SPIS-AA¹⁷-LYI, AVPKAXX:VPA:SPIS-AA¹⁷-LYI, KVGKAXX:VPA:SPIS-AA¹⁷-LYI, KASKAXX:VPA:SPIS-AA¹⁷-LYI, GSAGPXX:VPA:SPIS-AA¹⁷-LYI, STPPTXX:VPA:SPIS-AA¹⁷-LYI, HVPKPXX:VPA:SPIS-AA¹⁷-LYI, RVPSTXX:VPA:SPIS-AA¹⁷-LYI, ASAAPXX:VPA:SPIS-AA¹⁷-LYI, ASASPXX:VPA:SPIS-AA¹⁷-LYI, KIPKAXX:VPT:SPIS-AA¹⁷-LYI, GIPEPXX:VPE:SPIS-AA¹⁷-LYI, SIPKAXX:VPT:SPIS-AA¹⁷-LYI, HVTKPTX:APT:SPIS-AA¹⁷-LYI, YVPKPXX:APT:SPIS-AA¹⁷-LYI, TVPKPXX:APT:SPIS-AA¹⁷-LYI, AVPKAXX:APT:SPIS-AA¹⁷-LYI, KVGKAXX:VPT:SPIS-AA¹⁷-LYI, KASKAXX:VPT:SPIS-AA¹⁷-LYI, GSAGPXX:TPT:SPIS-AA¹⁷-LYI, STPPTXX:VPT:SPIS-AA¹⁷-LYI, HVPKPXX:APT:SPIS-AA¹⁷-LYI, RVPSTXX:APV:SPIS-AA¹⁷-LYI, ASAAPXX:VPQ:SPIS-AA¹⁷-LYI, ASASPXX:VSQ:SPIS-AA¹⁷-LYI, ASASPXX:VPQ:SPIS-AA¹⁷-LYI, NDEGLEX:VPT:SPIS-AA¹⁷-LYI, SSVKXQP:SRV:SPIS-AA¹⁷-LYI, RNVQXRP:TQV:SPIS-AA¹⁷-LYI, KIPKAXX:VPT:SPIS-AA¹⁷-LFI, GIPEPXX:VPT:SPIS-AA¹⁷-LFI, SIPKAXX:VPT:SPIS-AA¹⁷-LFI, HVTKPTX:VPT:SPIS-AA¹⁷-LFI, YVPKPXX:VPT:SPIS-AA¹⁷-LFI, TVPKPXX:VPT:SPIS-AA¹⁷-LFI, AVPKAXX:VPT:SPIS-AA¹⁷-LFI, KVGKAXX:VPT:SPIS-AA¹⁷-LFI, KASKAXX:VPT:SPIS-AA¹⁷-LFI, GSAGPXX:VPT:SPIS-AA¹⁷-LFI, AAPASXX:VPT:SPIS-AA¹⁷-LFI, HVPKPXX:VPT:SPIS-AA¹⁷-LFI, RVPSTXX:VPT:SPIS-AA¹⁷-LFI, ASAAPXX:VPT:SPIS-AA¹⁷-LFI, ASASPXX:VPT:SPIS-AA¹⁷-LFI, GIPEPXX:VPE:SPIS-AA¹⁷-LFI, HVTKPTX:APT:SPIS-AA¹⁷-LFI, YVPKPXX:APT:SPIS-AA¹⁷-LFI, TVPKPXX:APT:SPIS-AA¹⁷-LFI, AVPKAXX:APT:SPIS-AA¹⁷-LFI, GSAGPXX:TPT:SPIS-AA¹⁷-LFI, AAPASXX:VPA:SPIS-AA¹⁷-LFI, HVPKPXX:APT:SPIS-AA¹⁷-LFI, RVPSTXX:APV:SPIS-AA¹⁷-LFI, ASAAPXX:VPQ:SPIS-AA¹⁷-LFI, ASASPXX:VSQ:SPIS-AA¹⁷-LFI, ASASPXX:VPQ:SPIS-AA¹⁷-LFI, SSVKXQP:SRV:SPIS-AA¹⁷-LFI, RNVQXRP:TQV:SPIS-AA¹⁷-LFI, KIPKAXX:APV:KPLS-AA¹⁷-LYV, GIPEPXX:APV:KPLS-AA¹⁷-LYV, SIPKAXX:APV:KPLS-AA¹⁷-LYV, HVTKPTX:APV:KPLS-AA¹⁷-LYV, YVPKPXX:APV:KPLS-AA¹⁷-LYV, TVPKPXX:APV:KPLS-AA¹⁷-LYV, AVPKAXX:APV:KPLS-AA¹⁷-LYV, KVGKAXX:APV:KPLS-AA¹⁷-LYV, KASKAXX:APV:KPLS-AA¹⁷-LYV, GSAGPXX:APV:KPLS-AA¹⁷-LYV, AAPASXX:APV:KPLS-AA¹⁷-LYV, STPPTXX:APV:KPLS-AA¹⁷-LYV, HVPKPXX:APV:KPLS-AA¹⁷-LYV, ASAAPXX:APV:KPLS-AA¹⁷-LYV, ASASPXX:APV:KPLS-AA¹⁷-LYV, KIPKAXX:VPT:KPLS-AA¹⁷-LYV, GIPEPXX:VPE:KPLS-AA¹⁷-LYV, SIPKAXX:VPT:KPLS-AA¹⁷-LYV, HVTKPTX:APT:KPLS-AA¹⁷-LYV, YVPKPXX:APT:KPLS-AA¹⁷-LYV, TVPKPXX:APT:KPLS-AA¹⁷-LYV, AVPKAXX:APT:KPLS-AA¹⁷-LYV, KVGKAXX:VPT:KPLS-AA¹⁷-LYV, KASKAXX:VPT:KPLS-AA¹⁷-LYV, GSAGPXX:TPT:KPLS-AA¹⁷-LYV, AAPASXX:VPA:KPLS-AA¹⁷-LYV, STPPTXX:VPT:KPLS-AA¹⁷-LYV, HVPKPXX:APT:KPLS-AA¹⁷-LYV, ASAAPXX:VPQ:KPLS-AA¹⁷-LYV, ASASPXX:VSQ:KPLS-AA¹⁷-LYV, ASASPXX:VPQ:KPLS-AA¹⁷-LYV, NDEGLEX:VPT:KPLS-AA¹⁷-LYV, SSVKXQP:SRV:KPLS-AA¹⁷-LYV, RNVQXRP:TQV:KPLS-AA¹⁷-LYV, KIPKAXX:VPQ:EPLP-AA¹⁷-VYY, GIPEPXX:VPQ:EPLP-AA¹⁷-VYY, SIPKAXX:VPQ:EPLP-AA¹⁷-VYY, HVTKPTX:VPQ:EPLP-AA¹⁷-VYY, YVPKPXX:VPQ:EPLP-AA¹⁷-VYY, TVPKPXX:VPQ:EPLP-AA¹⁷-VYY, AVPKAXX:VPQ:EPLP-AA¹⁷-VYY, KVGKAXX:VPQ:EPLP-AA¹⁷-VYY, KASKAXX:VPQ:EPLP-AA¹⁷-VYY, GSAGPXX:VPQ:EPLP-AA¹⁷-VYY, AAPASXX:VPQ:EPLP-AA¹⁷-VYY, STPPTXX:VPQ:EPLP-AA¹⁷-VYY, HVPKPXX:VPQ:EPLP-AA¹⁷-VYY, RVPSTXX:VPQ:EPLP-AA¹⁷-VYY, ASASPXX:VPQ:EPLP-AA¹⁷-VYY, KIPKAXX:VPT:EPLP-AA¹⁷-VYY, GIPEPXX:VPE:EPLP-AA¹⁷-VYY, SIPKAXX:VPT:EPLP-AA¹⁷-VYY, HVTKPTX:APT:EPLP-AA¹⁷-VYY, YVPKPXX:APT:EPLP-AA¹⁷-VYY, TVPKPXX:APT:EPLP-AA¹⁷-VYY, AVPKAXX:APT:EPLP-AA¹⁷-VYY, KVGKAXX:VPT:EPLP-AA¹⁷-VYY, KASKAXX:VPT:EPLP-AA¹⁷-VYY, GSAGPXX:TPT:EPLP-AA¹⁷-VYY, AAPASXX:VPA:EPLP-AA¹⁷-VYY, STPPTXX:VPT:EPLP-AA¹⁷-VYY, HVPKPXX:APT:EPLP-AA¹⁷-VYY, RVPSTXX:APV:EPLP-AA¹⁷-VYY, ASASPXX:VSQ:EPLP-AA¹⁷-VYY, NDEGLEX:VPT:EPLP-AA¹⁷-VYY, SSVKXQP:SRV:EPLP-AA¹⁷-VYY, RNVQXRP:TQV:EPLP-AA¹⁷-VYY, KIPKAXX:VSQ:EPLT-AA¹⁷-LYY, GIPEPXX:VSQ:EPLT-AA¹⁷-LYY, SIPKAXX:VSQ:EPLT-AA¹⁷-LYY, HVTKPTX:VSQ:EPLT-AA¹⁷-LYY, YVPKPXX:VSQ:EPLT-AA¹⁷-LYY, TVPKPXX:VSQ:EPLT-AA¹⁷-LYY, AVPKAXX:VSQ:EPLT-AA¹⁷-LYY, KVGKAXX:VSQ:EPLT-AA¹⁷-LYY, KASKAXX:VSQ:EPLT-AA¹⁷-LYY, GSAGPXX:VSQ:EPLT-AA¹⁷-LYY, AAPASXX:VSQ:EPLT-AA¹⁷-LYY, STPPTXX:VSQ:EPLT-AA¹⁷-LYY, HVPKPXX:VSQ:EPLT-AA¹⁷-LYY, RVPSTXX:VSQ:EPLT-AA¹⁷-LYY, ASAAPXX:VSQ:EPLT-AA¹⁷-LYY, ASASPXX:VSQ:EPLT-AA¹⁷-LYY, KIPKAXX:VPT:EPLT-AA¹⁷-LYY, GIPEPXX:VPE:EPLT-AA¹⁷-LYY, SIPKAXX:VPT:EPLT-AA¹⁷-LYY, HVTKPTX:APT:EPLT-AA¹⁷-LYY, YVPKPXX:APT:EPLT-AA¹⁷-LYY, TVPKPXX:APT:EPLT-AA¹⁷-LYY, AVPKAXX:APT:EPLT-AA¹⁷-LYY, KVGKAXX:VPT:EPLT-AA¹⁷-LYY, KASKAXX:VPT:EPLT-AA¹⁷-LYY, GSAGPXX:TPT:EPLT-AA¹⁷-LYY, AAPASXX:VPA:EPLT-AA¹⁷-LYY, STPPTXX:VPT:EPLT-AA¹⁷-LYY, HVPKPXX:APT:EPLT-AA¹⁷-LYY, RVPSTXX:APV:EPLT-AA¹⁷-LYY, ASAAPXX:VPQ:EPLT-AA¹⁷-LYY, NDEGLEX:VPT:EPLT-AA¹⁷-LYY, SSVKXQP:SRV:EPLT-AA¹⁷-LYY, RNVQXRP:TQV:EPLT-AA¹⁷-LYY, KIPKAXX:VPQ:EPLT-AA¹⁷-LYY, GIPEPXX:VPQ:EPLT-AA¹⁷-LYY, SIPKAXX:VPQ:EPLT-AA¹⁷-LYY, HVTKPTX:VPQ:EPLT-AA¹⁷-LYY, YVPKPXX:VPQ:EPLT-AA¹⁷-LYY, TVPKPXX:VPQ:EPLT-AA¹⁷-LYY, AVPKAXX:VPQ:EPLT-AA¹⁷-LYY, KVGKAXX:VPQ:EPLT-AA¹⁷-LYY, KASKAXX:VPQ:EPLT-AA¹⁷-LYY, GSAGPXX:VPQ:EPLT-AA¹⁷-LYY, AAPASXX:VPQ:EPLT-AA¹⁷-LYY, STPPTXX:VPQ:EPLT-AA¹⁷-LYY, HVPKPXX:VPQ:EPLT-AA¹⁷-LYY, RVPSTXX:VPQ:EPLT-AA¹⁷-LYY, ASASPXX:VPQ:EPLT-AA¹⁷-LYY, NDEGLEX:VPT:SNIT-AA¹⁷-QIM, GIPEPXX:VPE:SNIT-AA¹⁷-QIM, HVTKPTX:APT:SNIT-AA¹⁷-QIM, YVPKPXX:APT:SNIT-AA¹⁷-QIM, TVPKPXX:APT:SNIT-AA¹⁷-QIM, AVPKAXX:APT:SNIT-AA¹⁷-QIM, GSAGPXX:TPT:SNIT-AA¹⁷-QIM, AAPASXX:VPA:SNIT-AA¹⁷-QIM, HVPKPXX:APT:SNIT-AA¹⁷-QIM, RVPSTXX:APV:SNIT-AA¹⁷-QIM, ASAAPXX:VPQ:SNIT-AA¹⁷-QIM, ASASPXX:VSQ:SNIT-AA¹⁷-QIM, ASASPXX:VPQ:SNIT-AA¹⁷-QIM, SSVKXQP:SRV:SNIT-AA¹⁷-QIM, RNVQXRP:TQV:SNIT-AA¹⁷-QIM, RNVQXRP:SRV:RSVK-AA¹⁷-AKV, KIPKAXX:VPT:RSVK-AA¹⁷-AKV, GIPEPXX:VPE:RSVK-AA¹⁷-AKV, SIPKAXX:VPT:RSVK-AA¹⁷-AKV, HVTKPTX:APT:RSVK-AA¹⁷-AKV, YVPKPXX:APT:RSVK-AA¹⁷-AKV, TVPKPXX:APT:RSVK-AA¹⁷-AKV, AVPKAXX:APT:RSVK-AA¹⁷-AKV, KVGKAXX:VPT:RSVK-AA¹⁷-AKV, KASKAXX:VPT:RSVK-AA¹⁷-AKV, GSAGPXX:TPT:RSVK-AA¹⁷-AKV, AAPASXX:VPA:RSVK-AA¹⁷-AKV, STPPTXX:VPT:RSVK-AA¹⁷-AKV, HVPKPXX:APT:RSVK-AA¹⁷-AKV, RVPSTXX:APV:RSVK-AA¹⁷-AKV, ASAAPXX:VPQ:RSVK-AA¹⁷-AKV, ASASPXX:VSQ:RSVK-AA¹⁷-AKV, ASASPXX:VPQ:RSVK-AA¹⁷-AKV, NDEGLEX:VPT:RSVK-AA¹⁷-AKV, RNVQXRP:TQV:RSVK-AA¹⁷-AKV, SSVKXQP:TQV:RPVQ-AA¹⁷-RKI, KIPKAXX:VPT:RPVQ-AA¹⁷-RKI, GIPEPXX:VPE:RPVQ-AA¹⁷-RKI, SIPKAXX:VPT:RPVQ-AA¹⁷-RKI, HVTKPTX:APT:RPVQ-AA¹⁷-RKI, YVPKPXX:APT:RPVQ-AA¹⁷-RKI, TVPKPXX:APT:RPVQ-AA¹⁷-RKI, AVPKAXX:APT:RPVQ-AA¹⁷-RKI, KVGKAXX:VPT:RPVQ-AA¹⁷-RKI, KASKAXX:VPT:RPVQ-AA¹⁷-RKI, GSAGPXX:TPT:RPVQ-AA¹⁷-RKI, AAPASXX:VPA:RPVQ-AA¹⁷-RKI, STPPTXX:VPT:RPVQ-AA¹⁷-RKI, HVPKPXX:APT:RPVQ-AA¹⁷-RKI, RVPSTXX:APV:RPVQ-AA¹⁷-RKI, ASAAPXX:VPQ:RPVQ-AA¹⁷-RKI, ASASPXX:VSQ:RPVQ-AA¹⁷-RKI, ASASPXX:VPQ:RPVQ-AA¹⁷-RKI, NDEGLEX:VPT:RPVQ-AA¹⁷-RKI and SSVKXQP:SRV:RPVQ-AA¹⁷-RKI; and wherein AA¹⁷ is selected from the group consisting of G, A, V, L, I, P, F, M, W, T and S (in particular is selected from the group consisting of M, I, L, V and T).

[0411] In certain embodiments, the triplet PEP7:PEP5:PEP1 is selected from the group consisting of

GIPEPXX:VPTKM:SAIS, HVTKPTX:VPTKL:SAIS,
YVPKPXX:VPTKL:SAIS, TVPKPXX:VPTQL:SAIS,
AVPKAXX:VPTKL:SAIS, KVGKAXX:VPTKL:SAIS,
KASKAXX:VPTKL:SAIS, GSAGPXX:VPTKM:SAIS,
AAPASXX:VPTRL:SAIS, STPPTXX:VPTRL:SAIS,
HVPKPXX:VPTKL:SAIS, RVPSTXX:VPTKT:SAIS,
ASAAPXX:VPTAL:SAIS, ASASPXX:VPTDL:SAIS,
GIPEPXX:VPEKM:SAIS, HVTKPTX:APTKL:SAIS,
YVPKPXX:APTKL:SAIS, TVPKPXX:APTQL:SAIS,
AVPKAXX:APTKL:SAIS, GSAGPXX:TPTKM:SAIS,
AAPASXX:VPARL:SAIS, HVPKPXX:APTKL:SAIS,
RVPSTXX:APVKT:SAIS, ASAAPXX:VPQAL:SAIS,
ASASPXX:VSQDL:SAIS, ASASPXX:VPQDL:SAIS,
SSVKXQP:SRVHH:SAIS, RNVQXRP:TQVQL:SAIS,
KIPKAXX:VPEEL:SSLS, SIPKAXX:VPEEL:SSLS,
HVTKPTX:VPEKL:SSLS, YVPKPXX:VPEKL:SSLS,
TVPKPXX:VPEQL:SSLS, AVPKAXX:VPEKL:SSLS,
KVGKAXX:VPEKL:SSLS, KASKAXX:VPEKL:SSLS,
GSAGPXX:VPEKM:SSLS, AAPASXX:VPERL:SSLS,
STPPTXX:VPERL:SSLS, HVPKPXX:VPEKL:SSLS,
RVPSTXX:VPEKT:SSLS, ASAAPXX:VPEAL:SSLS,
ASASPXX:VPEDL:SSLS, KIPKAXX:VPTEL:SSLS,
SIPKAXX:VPTEL:SSLS, HVTKPTX:APTKL:SSLS,
YVPKPXX:APTKL:SSLS, TVPKPXX:APTQL:SSLS,
AVPKAXX:APTKL:SSLS, KVGKAXX:VPTKL:SSLS,
KASKAXX:VPTKL:SSLS, GSAGPXX:TPTKM:SSLS,
AAPASXX:VPARL:SSLS, STPPTXX:VPTRL:SSLS,
HVPKPXX:APTKL:SSLS, RVPSTXX:APVKT:SSLS,
ASAAPXX:VPQAL:SSLS, ASASPXX:VSQDL:SSLS,
ASASPXX:VPQDL:SSLS, NDEGLEX:VPTEE:SSLS,
NDEGLEX:VPTGQ:SSLS, SSVKXQP:SRVHH:SSLS,
RNVQXRP:TQVQL:SSLS, KIPKAXX:APTEL:NAIS,
GIPEPXX:APTKM:NAIS, SIPKAXX:APTEL:NAIS,
AVPKAXX:APTKL:NAIS, KVGKAXX:APTKL:NAIS,
KASKAXX:APTKL:NAIS, GSAGPXX:APTKM:NAIS,
AAPASXX:APTRL:NAIS, STPPTXX:APTRL:NAIS,
RVPSTXX:APTKT:NAIS, ASAAPXX:APTAL:NAIS,
ASASPXX:APTDL:NAIS, KIPKAXX:VPTEL:NAIS,
GIPEPXX:VPEKM:NAIS, SIPKAXX:VPTEL:NAIS,
KVGKAXX:VPTKL:NAIS, KASKAXX:VPTKL:NAIS,
GSAGPXX:TPTKM:NAIS, AAPASXX:VPARL:NAIS,
STPPTXX:VPTRL:NAIS, RVPSTXX:APVKT:NAIS,
ASAAPXX:VPQAL:NAIS, ASASPXX:VSQDL:NAIS,
ASASPXX:VPQDL:NAIS, NDEGLEX:VPTEE:NAIS,
NDEGLEX:VPTGQ:NAIS, SSVKXQP:SRVHH:NAIS,
RNVQXRP:TQVQL:NAIS, KIPKAXX:APTEL:SATS,
GIPEPXX:APTKM:SATS, SIPKAXX:APTEL:SATS,
HVTKPTX:APTKL:SATS, YVPKPXX:APTKL:SATS,
TVPKPXX:APTQL:SATS, KVGKAXX:APTKL:SATS,
KASKAXX:APTKL:SATS, GSAGPXX:APTKM:SATS,
AAPASXX:APTRL:SATS, STPPTXX:APTRL:SATS,
HVPKPXX:APTKL:SATS, RVPSTXX:APTKT:SATS,
ASAAPXX:APTAL:SATS, ASASPXX:APTDL:SATS,
KIPKAXX:VPTEL:SATS, GIPEPXX:VPEKM:SATS,
SIPKAXX:VPTEL:SATS, KVGKAXX:VPTKL:SATS,
KASKAXX:VPTKL:SATS, GSAGPXX:TPTKM:SATS,
AAPASXX:VPARL:SATS, STPPTXX:VPTRL:SATS,
RVPSTXX:APVKT:SATS, ASAAPXX:VPQAL:SATS,
ASASPXX:VSQDL:SATS, ASASPXX:VPQDL:SATS,
NDEGLEX:VPTEE:SATS, NDEGLEX:VPTGQ:SATS,
SSVKXQP:SRVHH:SATS, RNVQXRP:TQVQL:SATS,
KIPKAXX:VPTEL:SPIS, GIPEPXX:VPTKM:SPIS,
SIPKAXX:VPTEL:SPIS, HVTKPTX:VPTKL:SPIS,
YVPKPXX:VPTKL:SPIS, TVPKPXX:VPTQL:SPIS,
AVPKAXX:VPTKL:SPIS, KASKAXX:VPTKL:SPIS,
GSAGPXX:VPTKM:SPIS, AAPASXX:VPTRL:SPIS,
STPPTXX:VPTRL:SPIS, HVPKPXX:VPTKL:SPIS,
RVPSTXX:VPTKT:SPIS, ASAAPXX:VPTAL:SPIS,
ASASPXX:VPTDL:SPIS, GIPEPXX:VPEKM:SPIS,
HVTKPTX:APTKL:SPIS, YVPKPXX:APTKL:SPIS,
TVPKPXX:APTQL:SPIS, AVPKAXX:APTKL:SPIS,
GSAGPXX:TPTKM:SPIS, AAPASXX:VPARL:SPIS,
HVPKPXX:APTKL:SPIS, RVPSTXX:APVKT:SPIS,
ASAAPXX:VPQAL:SPIS, ASASPXX:VSQDL:SPIS,
ASASPXX:VPQDL:SPIS, SSVKXQP:SRVHH:SPIS,
RNVQXRP:TQVQL:SPIS, KIPKAXX:VPTEL:EPIS,
GIPEPXX:VPTKM:EPIS, SIPKAXX:VPTEL:EPIS,
HVTKPTX:VPTKL:EPIS, YVPKPXX:VPTKL:EPIS,
TVPKPXX:VPTQL:EPIS, AVPKAXX:VPTKL:EPIS,
KVGKAXX:VPTKL:EPIS, GSAGPXX:VPTKM:EPIS,
AAPASXX:VPTRL:EPIS, STPPTXX:VPTRL:EPIS,
HVPKPXX:VPTKL:EPIS, RVPSTXX:VPTKT:EPIS,
ASAAPXX:VPTAL:EPIS, ASASPXX:VPTDL:EPIS,
GIPEPXX:VPEKM:EPIS, HVTKPTX:APTKL:EPIS,
YVPKPXX:APTKL:EPIS, TVPKPXX:APTQL:EPIS,
AVPKAXX:APTKL:EPIS, GSAGPXX:TPTKM:EPIS,
AAPASXX:VPARL:EPIS, HVPKPXX:APTKL:EPIS,
RVPSTXX:APVKT:EPIS, ASAAPXX:VPQAL:EPIS,
ASASPXX:VSQDL:EPIS, ASASPXX:VPQDL:EPIS,
SSVKXQP:SRVHH:EPIS, RNVQXRP:TQVQL:EPIS,
KIPKAXX:TPTEL:SPIN, GIPEPXX:TPTKM:SPIN,
SIPKAXX:TPTEL:SPIN, HVTKPTX:TPTKL:SPIN,
YVPKPXX:TPTKL:SPIN, TVPKPXX:TPTQL:SPIN,
AVPKAXX:TPTKL:SPIN, KVGKAXX:TPTKL:SPIN,
KASKAXX:TPTKL:SPIN, AAPASXX:TPTRL:SPIN,
STPPTXX:TPTRL:SPIN, HVPKPXX:TPTKL:SPIN,
RVPSTXX:TPTKT:SPIN, ASAAPXX:TPTAL:SPIN,
ASASPXX:TPTDL:SPIN, KIPKAXX:VPTEL:SPIN,
GIPEPXX:VPEKM:SPIN, SIPKAXX:VPTEL:SPIN,
HVTKPTX:APTKL:SPIN, YVPKPXX:APTKL:SPIN,
TVPKPXX:APTQL:SPIN, AVPKAXX:APTKL:SPIN,
KVGKAXX:VPTKL:SPIN, KASKAXX:VPTKL:SPIN,
AAPASXX:VPARL:SPIN, STPPTXX:VPTRL:SPIN,
HVPKPXX:APTKL:SPIN, RVPSTXX:APVKT:SPIN,
ASAAPXX:VPQAL:SPIN, ASASPXX:VSQDL:SPIN,
ASASPXX:VPQDL:SPIN, NDEGLEX:VPTEE:SPIN,
NDEGLEX:VPTGQ:SPIN, SSVKXQP:SRVHH:SPIN,
RNVQXRP:TQVQL:SPIN, KIPKAXX:VPAEL:SPIS,
GIPEPXX:VPAKM:SPIS, SIPKAXX:VPAEL:SPIS,
HVTKPTX:VPAKL:SPIS, YVPKPXX:VPAKL:SPIS,
TVPKPXX:VPAQL:SPIS, AVPKAXX:VPAKL:SPIS,
KVGKAXX:VPAKL:SPIS, KASKAXX:VPAKL:SPIS,
GSAGPXX:VPAKM:SPIS, STPPTXX:VPARL:SPIS,
HVPKPXX:VPAKL:SPIS, RVPSTXX:VPAKT:SPIS,
ASAAPXX:VPAAL:SPIS, ASASPXX:VPADL:SPIS,
KVGKAXX:VPTKL:SPIS, NDEGLEX:VPTEE:SPIS,
NDEGLEX:VPTGQ:SPIS, KIPKAXX:APVEL:KPLS,
GIPEPXX:APVKM:KPLS, SIPKAXX:APVEL:KPLS,
HVTKPTX:APVKL:KPLS, YVPKPXX:APVKL:KPLS,
TVPKPXX:APVQL:KPLS, AVPKAXX:APVKL:KPLS,
KVGKAXX:APVKL:KPLS, KASKAXX:APVKL:KPLS,
GSAGPXX:APVKM:KPLS, AAPASXX:APVRL:KPLS,
STPPTXX:APVRL:KPLS, HVPKPXX:APVKL:KPLS,
ASAAPXX:APVAL:KPLS, ASASPXX:APVDL:KPLS,
KIPKAXX:VPTEL:KPLS, GIPEPXX:VPEKM:KPLS,
SIPKAXX:VPTEL:KPLS, HVTKPTX:APTKL:KPLS,
YVPKPXX:APTKL:KPLS, TVPKPXX:APTQL:KPLS,
AVPKAXX:APTKL:KPLS, KVGKAXX:VPTKL:KPLS,
KASKAXX:VPTKL:KPLS, GSAGPXX:TPTKM:KPLS,
AAPASXX:VPARL:KPLS, STPPTXX:VPTRL:KPLS,
HVPKPXX:APTKL:KPLS, ASAAPXX:VPQAL:KPLS,
ASASPXX:VSQDL:KPLS, ASASPXX:VPQDL:KPLS,
NDEGLEX:VPTEE:KPLS, NDEGLEX:VPTGQ:KPLS,
SSVKXQP:SRVHH:KPLS, RNVQXRP:TQVQL:KPLS,
KIPKAXX:VPQEL:EPLP, GIPEPXX:VPQKM:EPLP,
SIPKAXX:VPQEL:EPLP, HVTKPTX:VPQKL:EPLP,
YVPKPXX:VPQKL:EPLP, TVPKPXX:VPQQL:EPLP,
AVPKAXX:VPQKL:EPLP, KVGKAXX:VPQKL:EPLP,
KASKAXX:VPQKL:EPLP, GSAGPXX:VPQKM:EPLP,
AAPASXX:VPQRL:EPLP, STPPTXX:VPQRL:EPLP,
HVPKPXX:VPQKL:EPLP, RVPSTXX:VPQKT:EPLP,
ASASPXX:VPQDL:EPLP, KIPKAXX:VPTEL:EPLP,
GIPEPXX:VPEKM:EPLP, SIPKAXX:VPTEL:EPLP,
HVTKPTX:APTKL:EPLP, YVPKPXX:APTKL:EPLP,
TVPKPXX:APTQL:EPLP, AVPKAXX:APTKL:EPLP,
KVGKAXX:VPTKL:EPLP, KASKAXX:VPTKL:EPLP,
GSAGPXX:TPTKM:EPLP, AAPASXX:VPARL:EPLP,
STPPTXX:VPTRL:EPLP, HVPKPXX:APTKL:EPLP,
RVPSTXX:APVKT:EPLP, ASASPXX:VSQDL:EPLP,
NDEGLEX:VPTEE:EPLP, NDEGLEX:VPTGQ:EPLP,
SSVKXQP:SRVHH:EPLP, RNVQXRP:TQVQL:EPLP,
KIPKAXX:VSQEL:EPLT, GIPEPXX:VSQKM:EPLT,
SIPKAXX:VSQEL:EPLT, HVTKPTX:VSQKL:EPLT,
YVPKPXX:VSQKL:EPLT, TVPKPXX:VSQQL:EPLT,
AVPKAXX:VSQKL:EPLT, KVGKAXX:VSQKL:EPLT,
KASKAXX:VSQKL:EPLT, GSAGPXX:VSQKM:EPLT,
AAPASXX:VSQRL:EPLT, STPPTXX:VSQRL:EPLT,
HVPKPXX:VSQKL:EPLT, RVPSTXX:VSQKT:EPLT,
ASAAPXX:VSQAL:EPLT, ASASPXX:VSQDL:EPLT,
KIPKAXX:VPTEL:EPLT, GIPEPXX:VPEKM:EPLT,
SIPKAXX:VPTEL:EPLT, HVTKPTX:APTKL:EPLT,
YVPKPXX:APTKL:EPLT, TVPKPXX:APTQL:EPLT,
AVPKAXX:APTKL:EPLT, KVGKAXX:VPTKL:EPLT,
KASKAXX:VPTKL:EPLT, GSAGPXX:TPTKM:EPLT,
AAPASXX:VPARL:EPLT, STPPTXX:VPTRL:EPLT,
HVPKPXX:APTKL:EPLT, RVPSTXX:APVKT:EPLT,
ASAAPXX:VPQAL:EPLT, NDEGLEX:VPTEE:EPLT,
NDEGLEX:VPTGQ:EPLT, SSVKXQP:SRVHH:EPLT,
RNVQXRP:TQVQL:EPLT, KIPKAXX:VPQEL:EPLT,
GIPEPXX:VPQKM:EPLT, SIPKAXX:VPQEL:EPLT,
HVTKPTX:VPQKL:EPLT, YVPKPXX:VPQKL:EPLT,
TVPKPXX:VPQQL:EPLT, AVPKAXX:VPQKL:EPLT,
KVGKAXX:VPQKL:EPLT, KASKAXX:VPQKL:EPLT,
GSAGPXX:VPQKM:EPLT, AAPASXX:VPQRL:EPLT,
STPPTXX:VPQRL:EPLT, HVPKPXX:VPQKL:EPLT,
RVPSTXX:VPQKT:EPLT, ASASPXX:VPQDL:EPLT,
NDEGLEX:VPTGQ:SNIT, GIPEPXX:VPEKM:SNIT,
HVTKPTX:APTKL:SNIT, YVPKPXX:APTKL:SNIT,
TVPKPXX:APTQL:SNIT, AVPKAXX:APTKL:SNIT,
GSAGPXX:TPTKM:SNIT, AAPASXX:VPARL:SNIT,
HVPKPXX:APTKL:SNIT, RVPSTXX:APVKT:SNIT,
ASAAPXX:VPQAL:SNIT, ASASPXX:VSQDL:SNIT,
ASASPXX:VPQDL:SNIT, SSVKXQP:SRVHH:SNIT,
RNVQXRP:TQVQL:SNIT, RNVQXRP:SRVQL:RSVK,
KIPKAXX:VPTEL:RSVK, GIPEPXX:VPEKM:RSVK,
SIPKAXX:VPTEL:RSVK, HVTKPTX:APTKL:RSVK,
YVPKPXX:APTKL:RSVK, TVPKPXX:APTQL:RSVK,
AVPKAXX:APTKL:RSVK, KVGKAXX:VPTKL:RSVK,
KASKAXX:VPTKL:RSVK, GSAGPXX:TPTKM:RSVK,
AAPASXX:VPARL:RSVK, STPPTXX:VPTRL:RSVK,
HVPKPXX:APTKL:RSVK, RVPSTXX:APVKT:RSVK,
ASAAPXX:VPQAL:RSVK, ASASPXX:VSQDL:RSVK,
ASASPXX:VPQDL:RSVK, NDEGLEX:VPTEE:RSVK,
NDEGLEX:VPTGQ:RSVK, RNVQXRP:TQVQL:RSVK,
SSVKXQP:TQVHH:RPVQ, KIPKAXX:VPTEL:RPVQ,
GIPEPXX:VPEKM:RPVQ, SIPKAXX:VPTEL:RPVQ,
HVTKPTX:APTKL:RPVQ, YVPKPXX:APTKL:RPVQ,
TVPKPXX:APTQL:RPVQ, AVPKAXX:APTKL:RPVQ,
KVGKAXX:VPTKL:RPVQ, KASKAXX:VPTKL:RPVQ,
GSAGPXX:TPTKM:RPVQ, AAPASXX:VPARL:RPVQ,
STPPTXX:VPTRL:RPVQ, HVPKPXX:APTKL:RPVQ,
RVPSTXX:APVKT:RPVQ, ASAAPXX:VPQAL:RPVQ,
ASASPXX:VSQDL:RPVQ, ASASPXX:VPQDL:RPVQ,
NDEGLEX:VPTEE:RPVQ, NDEGLEX:VPTGQ:RPVQ
and
SSVKXQP:SRVHH:RPVQ.

[0412] In certain embodiments, the triplet PEP7:PEP5:PEP12 is selected from the group consisting of GIPEPXX:VPTKM:SAIS-AA¹⁷-LYL, HVTKPTX:VPTKL:SAIS-AA¹⁷-LYL, YVPKPXX:VPTKL:SAIS-AA¹⁷-LYL, TVPKPXX:VPTQL:SAIS-AA¹⁷-LYL, AVPKAXX:VPTKL:SAIS-AA¹⁷-LYL, KVGKAXX:VPTKL:SAIS-AA¹⁷-LYL, KASKAXX:VPTKL:SAIS-AA¹⁷-LYL, GSAGPXX:VPTKM:SAIS-AA¹⁷-LYL, AAPASXX:VPTRL:SAIS-AA¹⁷-LYL, STPPTXX:VPTRL:SAIS-AA¹⁷-LYL, HVPKPXX:VPTKL:SAIS-AA¹⁷-LYL, RVPSTXX:VPTKT:SAIS-AA¹⁷-LYL, ASAAPXX:VPTAL:SAIS-AA¹⁷-LYL, ASASPXX:VPTDL:SAIS-AA¹⁷-LYL, GIPEPXX:VPEKM:SAIS-AA¹⁷-LYL, HVTKPTX:APTKL:SAIS-AA¹⁷-LYL, YVPKPXX:APTKL:SAIS-AA¹⁷-LYL, TVPKPXX:APTQL:SAIS-AA¹⁷-LYL, AVPKAXX:APTKL:SAIS-AA¹⁷-LYL, GSAGPXX:TPTKM:SAIS-AA¹⁷-LYL, AAPASXX:VPARL:SAIS-AA¹⁷-LYL, HVPKPXX:APTKL:SAIS-AA¹⁷-LYL, RVPSTXX:APVKT:SAIS-AA¹⁷-LYL, ASAAPXX:VPQAL:SAIS-AA¹⁷-LYL, ASASPXX:VSQDL:SAIS-AA¹⁷-LYL, ASASPXX:VPQDL:SAIS-AA¹⁷-LYL, SSVKXQP:SRVHH:SAIS-AA¹⁷-LYL, RNVQXRP:TQVQL:SAIS-AA¹⁷-LYL, KIPKAXX:VPEEL:SSLS-AA¹⁷-LFF, SIPKAXX:VPEEL:SSLS-AA¹⁷-LFF, HVTKPTX:VPEKL:SSLS-AA¹⁷-LFF, YVPKPXX:VPEKL:SSLS-AA¹⁷-LFF, TVPKPXX:VPEQL:SSLS-AA¹⁷-LFF, AVPKAXX:VPEKL:SSLS-AA¹⁷-LFF, KVGKAXX:VPEKL:SSLS-AA¹⁷-LFF, KASKAXX:VPEKL:SSLS-AA¹⁷-LFF, GSAGPXX:VPEKM:SSLS-AA¹⁷-LFF, AAPASXX:VPERL:SSLS-AA¹⁷-LFF, STPPTXX:VPERL:SSLS-AA¹⁷-LFF, HVPKPXX:VPEKL:SSLS-AA¹⁷-LFF, RVPSTXX:VPEKT:SSLS-AA¹⁷-LFF, ASAAPXX:VPEAL:SSLS-AA¹⁷-LFF, ASASPXX:VPEDL:SSLS-AA¹⁷-LFF, KIPKAXX:VPTEL:SSLS-AA¹⁷-LFF, SIPKAXX:VPTEL:SSLS-AA¹⁷-LFF, HVTKPTX:APTKL:SSLS-AA¹⁷-LFF, YVPKPXX:APTKL:SSLS-AA¹⁷-LFF, TVPKPXX:APTQL:SSLS-AA¹⁷-LFF, AVPKAXX:APTKL:SSLS-AA¹⁷-LFF, KVGKAXX:VPTKL:SSLS-AA¹⁷-LFF, KASKAXX:VPTKL:SSLS-AA¹⁷-LFF, GSAGPXX:TPTKM:SSLS-AA¹⁷-LFF, AAPASXX:VPARL:SSLS-AA¹⁷-LFF, STPPTXX:VPTRL:SSLS-AA¹⁷-LFF, HVPKPXX:APTKL:SSLS-AA¹⁷-LFF, RVPSTXX:APVKT:SSLS-AA¹⁷-LFF, ASAAPXX:VPQAL:SSLS-AA¹⁷-LFF, ASASPXX:VSQDL:SSLS-AA¹⁷-LFF, ASASPXX:VPQDL:SSLS-AA¹⁷-LFF, NDEGLEX:VPTEE:SSLS-AA¹⁷-LFF, NDEGLEX:VPTGQ:SSLS-AA¹⁷-LFF, SSVKXQP:SRVHH:SSLS-AA¹⁷-LFF, RNVQXRP:TQVQL:SSLS-AA¹⁷-LFF, KIPKAXX:APTEL:NAIS-AA¹⁷-LYF, GIPEPXX:APTKM:NAIS-AA¹⁷-LYF, SIPKAXX:APTEL:NAIS-AA¹⁷-LYF, AVPKAXX:APTKL:NAIS-AA¹⁷-LYF, KVGKAXX:APTKL:NAIS-AA¹⁷-LYF, KASKAXX:APTKL:NAIS-AA¹⁷-LYF, GSAGPXX:APTKM:NAIS-AA¹⁷-LYF, AAPASXX:APTRL:NAIS-AA¹⁷-LYF, STPPTXX:APTRL:NAIS-AA¹⁷-LYF, RVPSTXX:APTKT:NAIS-AA¹⁷-LYF, ASAAPXX:APTAL:NAIS-AA¹⁷-LYF, ASASPXX:APTDL:NAIS-AA¹⁷-LYF, KIPKAXX:VPTEL:NAIS-AA¹⁷-LYF, GIPEPXX:VPEKM:NAIS-AA¹⁷-LYF, SIPKAXX:VPTEL:NAIS-AA¹⁷-LYF, KVGKAXX:VPTKL:NAIS-AA¹⁷-LYF, KASKAXX:VPTKL:NAIS-AA¹⁷-LYF, GSAGPXX:TPTKM:NAIS-AA¹⁷-LYF, AAPASXX:VPARL:NAIS-AA¹⁷-LYF, STPPTXX:VPTRL:NAIS-AA¹⁷-LYF, RVPSTXX:APVKT:NAIS-AA¹⁷-LYF, ASAAPXX:VPQAL:NAIS-AA¹⁷-LYF, ASASPXX:VSQDL:NAIS-AA¹⁷-LYF, ASASPXX:VPQDL:NAIS-AA¹⁷-LYF, NDEGLEX:VPTEE:NAIS-AA¹⁷-LYF, NDEGLEX:VPTGQ:NAIS-AA¹⁷-LYF, SSVKXQP:SRVHH:NAIS-AA¹⁷-LYF, RNVQXRP:TQVQL:NAIS-AA¹⁷-LYF, KIPKAXX:APTEL:SATS-AA¹⁷-LYY, GIPEPXX:APTKM:SATS-AA¹⁷-LYY, SIPKAXX:APTEL:SATS-AA¹⁷-LYY, HVTKPTX:APTKL:SATS-AA¹⁷-LYY, YVPKPXX:APTKL:SATS-AA¹⁷-LYY, TVPKPXX:APTQL:SATS-AA¹⁷-LYY, KVGKAXX:APTKL:SATS-AA¹⁷-LYY, KASKAXX:APTKL:SATS-AA¹⁷-LYY, GSAGPXX:APTKM:SATS-AA¹⁷-LYY, AAPASXX:APTRL:SATS-AA¹⁷-LYY, STPPTXX:APTRL:SATS-AA¹⁷-LYY, HVPKPXX:APTKL:SATS-AA¹⁷-LYY, RVPSTXX:APTKT:SATS-AA¹⁷-LYY, ASAAPXX:APTAL:SATS-AA¹⁷-LYY, ASASPXX:APTDL:SATS-AA¹⁷-LYY, KIPKAXX:VPTEL:SATS-AA¹⁷-LYY, GIPEPXX:VPEKM:SATS-AA¹⁷-LYY, SIPKAXX:VPTEL:SATS-AA¹⁷-LYY, KVGKAXX:VPTKL:SATS-AA¹⁷-LYY, KASKAXX:VPTKL:SATS-AA¹⁷-LYY, GSAGPXX:TPTKM:SATS-AA¹⁷-LYY, AAPASXX:VPARL:SATS-AA¹⁷-LYY, STPPTXX:VPTRL:SATS-AA¹⁷-LYY, RVPSTXX:APVKT:SATS-AA¹⁷-LYY, ASAAPXX:VPQAL:SATS-AA¹⁷-LYY, ASASPXX:VSQDL:SATS-AA¹⁷-LYY, ASASPXX:VPQDL:SATS-AA¹⁷-LYY, NDEGLEX:VPTEE:SATS-AA¹⁷-LYY, NDEGLEX:VPTGQ:SATS-AA¹⁷-LYY, SSVKXQP:SRVHH:SATS-AA¹⁷-LYY, RNVQXRP:TQVQL:SATS-AA¹⁷-LYY, KIPKAXX:VPTEL:SPIS-AA¹⁷-LYK, GIPEPXX:VPTKM:SPIS-AA¹⁷-LYK, SIPKAXX:VPTEL:SPIS-AA¹⁷-LYK, HVTKPTX:VPTKL:SPIS-AA¹⁷-LYK, YVPKPXX:VPTKL:SPIS-AA¹⁷-LYK, TVPKPXX:VPTQL:SPIS-AA¹⁷-LYK, AVPKAXX:VPTKL:SPIS-AA¹⁷-LYK, KASKAXX:VPTKL:SPIS-AA¹⁷-LYK, GSAGPXX:VPTKM:SPIS-AA¹⁷-LYK, AAPASXX:VPTRL:SPIS-AA¹⁷-LYK, STPPTXX:VPTRL:SPIS-AA¹⁷-LYK, HVPKPXX:VPTKL:SPIS-AA¹⁷-LYK, RVPSTXX:VPTKT:SPIS-AA¹⁷-LYK, ASAAPXX:VPTAL:SPIS-AA¹⁷-LYK, ASASPXX:VPTDL:SPIS-AA¹⁷-LYK, GIPEPXX:VPEKM:SPIS-AA¹⁷-LYK, HVTKPTX:APTKL:SPIS-AA¹⁷-LYK, YVPKPXX:APTKL:SPIS-AA¹⁷-LYK, TVPKPXX:APTQL:SPIS-AA¹⁷-LYK, AVPKAXX:APTKL:SPIS-AA¹⁷-LYK, GSAGPXX:TPTKM:SPIS-AA¹⁷-LYK, AAPASXX:VPARL:SPIS-AA¹⁷-LYK, HVPKPXX:APTKL:SPIS-AA¹⁷-LYK, RVPSTXX:APVKT:SPIS-AA¹⁷-LYK, ASAAPXX:VPQAL:SPIS-AA¹⁷-LYK, ASASPXX:VSQDL:SPIS-AA¹⁷-LYK, ASASPXX:VPQDL:SPIS-AA¹⁷-LYK, SSVKXQP:SRVHH:SPIS-AA¹⁷-LYK, RNVQXRP:TQVQL:SPIS-AA¹⁷-LYK, KIPKAXX:VPTEL:EPIS-AA¹⁷-LYL, GIPEPXX:VPTKM:EPIS-AA¹⁷-LYL, SIPKAXX:VPTEL:EPIS-AA¹⁷-LYL, HVTKPTX:VPTKL:EPIS-AA¹⁷-LYL, YVPKPXX:VPTKL:EPIS-AA¹⁷-LYL, TVPKPXX:VPTQL:EPIS-AA¹⁷-LYL, AVPKAXX:VPTKL:EPIS-AA¹⁷-LYL, KVGKAXX:VPTKL:EPIS-AA¹⁷-LYL, GSAGPXX:VPTKM:EPIS-AA¹⁷-LYL, AAPASXX:VPTRL:EPIS-AA¹⁷-LYL, STPPTXX:VPTRL:EPIS-AA¹⁷-LYL, HVPKPXX:VPTKL:EPIS-AA¹⁷-LYL, RVPSTXX:VPTKT:EPIS-AA¹⁷-LYL, ASAAPXX:VPTAL:EPIS-AA¹⁷-LYL, ASASPXX:VPTDL:EPIS-AA¹⁷-LYL, GIPEPXX:VPEKM:EPIS-AA¹⁷-LYL, HVTKPTX:APTKL:EPIS-AA¹⁷-LYL, YVPKPXX:APTKL:EPIS-AA¹⁷-LYL, TVPKPXX:APTQL:EPIS-AA¹⁷-LYL, AVPKAXX:APTKL:EPIS-AA¹⁷-LYL, GSAGPXX:TPTKM:EPIS-AA¹⁷-LYL, AAPASXX:VPARL:EPIS-AA¹⁷-LYL, HVPKPXX:APTKL:EPIS-AA¹⁷-LYL, RVPSTXX:APVKT:EPIS-AA¹⁷-LYL, ASAAPXX:VPQAL:EPIS-AA¹⁷-LYL, ASASPXX:VSQDL:EPIS-AA¹⁷-LYL, ASASPXX:VPQDL:EPIS-AA¹⁷-LYL, SSVKXQP:SRVHH:EPIS-AA¹⁷-LYL, RNVQXRP:TQVQL:EPIS-AA¹⁷-LYL, KIPKAXX:TPTEL:SPIN-AA¹⁷-LYF, GIPEPXX:TPTKM:SPIN-AA¹⁷-LYF, SIPKAXX:TPTEL:SPIN-AA¹⁷-LYF, HVTKPTX:TPTKL:SPIN-AA¹⁷-LYF, YVPKPXX:TPTKL:SPIN-AA¹⁷-LYF, TVPKPXX:TPTQL:SPIN-AA¹⁷-LYF, AVPKAXX:TPTKL:SPIN-AA¹⁷-LYF, KVGKAXX:TPTKL:SPIN-AA¹⁷-LYF, KASKAXX:TPTKL:SPIN-AA¹⁷-LYF, AAPASXX:TPTRL:SPIN-AA¹⁷-LYF, STPPTXX:TPTRL:SPIN-AA¹⁷-LYF, HVPKPXX:TPTKL:SPIN-AA¹⁷-LYF, RVPSTXX:TPTKT:SPIN-AA¹⁷-LYF, ASAAPXX:TPTAL:SPIN-AA¹⁷-LYF, ASASPXX:TPTDL:SPIN-AA¹⁷-LYF, KIPKAXX:VPTEL:SPIN-AA¹⁷-LYF, GIPEPXX:VPEKM:SPIN-AA¹⁷-LYF, SIPKAXX:VPTEL:SPIN-AA¹⁷-LYF, HVTKPTX:APTKL:SPIN-AA¹⁷-LYF, YVPKPXX:APTKL:SPIN-AA¹⁷-LYF, TVPKPXX:APTQL:SPIN-AA¹⁷-LYF, AVPKAXX:APTKL:SPIN-AA¹⁷-LYF, KVGKAXX:VPTKL:SPIN-AA¹⁷-LYF, KASKAXX:VPTKL:SPIN-AA¹⁷-LYF, AAPASXX:VPARL:SPIN-AA¹⁷-LYF, STPPTXX:VPTRL:SPIN-AA¹⁷-LYF, HVPKPXX:APTKL:SPIN-AA¹⁷-LYF, RVPSTXX:APVKT:SPIN-AA¹⁷-LYF, ASAAPXX:VPQAL:SPIN-AA¹⁷-LYF, ASASPXX:VSQDL:SPIN-AA¹⁷-LYF, ASASPXX:VPQDL:SPIN-AA¹⁷-LYF, NDEGLEX:VPTEE:SPIN-AA¹⁷-LYF, NDEGLEX:VPTGQ:SPIN-AA¹⁷-LYF, SSVKXQP:SRVHH:SPIN-AA¹⁷-LYF, RNVQXRP:TQVQL:SPIN-AA¹⁷-LYF, KIPKAXX:VPAEL:SPIS-AA¹⁷-LYI, GIPEPXX:VPAKM:SPIS-AA¹⁷-LYI, SIPKAXX:VPAEL:SPIS-AA¹⁷-LYI, HVTKPTX:VPAKL:SPIS-AA¹⁷-LYI, YVPKPXX:VPAKL:SPIS-AA¹⁷-LYI, TVPKPXX:VPAQL:SPIS-AA¹⁷-LYI, AVPKAXX:VPAKL:SPIS-AA¹⁷-LYI, KVGKAXX:VPAKL:SPIS-AA¹⁷-LYI, KASKAXX:VPAKL:SPIS-AA¹⁷-LYI, GSAGPXX:VPAKM:SPIS-AA¹⁷-LYI, STPPTXX:VPARL:SPIS-AA¹⁷-LYI, HVPKPXX:VPAKL:SPIS-AA¹⁷-LYI, RVPSTXX:VPAKT:SPIS-AA¹⁷-LYI, ASAAPXX:VPAAL:SPIS-AA¹⁷-LYI, ASASPXX:VPADL:SPIS-AA¹⁷-LYI, KIPKAXX:VPTEL:SPIS-AA¹⁷-LYI, GIPEPXX:VPEKM:SPIS-AA¹⁷-LYI, SIPKAXX:VPTEL:SPIS-AA¹⁷-LYI, HVTKPTX:APTKL:SPIS-AA¹⁷-LYI, YVPKPXX:APTKL:SPIS-AA¹⁷-LYI, TVPKPXX:APTQL:SPIS-AA¹⁷-LYI, AVPKAXX:APTKL:SPIS-AA¹⁷-LYI, KVGKAXX:VPTKL:SPIS-AA¹⁷-LYI, KASKAXX:VPTKL:SPIS-AA¹⁷-LYI, GSAGPXX:TPTKM:SPIS-AA¹⁷-LYI, STPPTXX:VPTRL:SPIS-AA¹⁷-LYI, HVPKPXX:APTKL:SPIS-AA¹⁷-LYI, RVPSTXX:APVKT:SPIS-AA¹⁷-LYI, ASAAPXX:VPQAL:SPIS-AA¹⁷-LYI, ASASPXX:VSQDL:SPIS-AA¹⁷-LYI, ASASPXX:VPQDL:SPIS-AA¹⁷-LYI, NDEGLEX:VPTEE:SPIS-AA¹⁷-LYI, NDEGLEX:VPTGQ:SPIS-AA¹⁷-LYI, SSVKXQP:SRVHH:SPIS-AA¹⁷-LYI, RNVQXRP:TQVQL:SPIS-AA¹⁷-LYI, KIPKAXX:VPTEL:SPIS-AA¹⁷-LFI, GIPEPXX:VPTKM:SPIS-AA¹⁷-LFI, SIPKAXX:VPTEL:SPIS-AA¹⁷-LFI, HVTKPTX:VPTKL:SPIS-AA¹⁷-LFI, YVPKPXX:VPTKL:SPIS-AA¹⁷-LFI, TVPKPXX:VPTQL:SPIS-AA¹⁷-LFI, AVPKAXX:VPTKL:SPIS-AA¹⁷-LFI, KVGKAXX:VPTKL:SPIS-AA¹⁷-LFI, KASKAXX:VPTKL:SPIS-AA¹⁷-LFI, GSAGPXX:VPTKM:SPIS-AA¹⁷-LFI, AAPASXX:VPTRL:SPIS-AA¹⁷-LFI, HVPKPXX:VPTKL:SPIS-AA¹⁷-LFI, RVPSTXX:VPTKT:SPIS-AA¹⁷-LFI, ASAAPXX:VPTAL:SPIS-AA¹⁷-LFI, ASASPXX:VPTDL:SPIS-AA¹⁷-LFI, GIPEPXX:VPEKM:SPIS-AA¹⁷-LFI, HVTKPTX:APTKL:SPIS-AA¹⁷-LFI, YVPKPXX:APTKL:SPIS-AA¹⁷-LFI, TVPKPXX:APTQL:SPIS-AA¹⁷-LFI, AVPKAXX:APTKL:SPIS-AA¹⁷-LFI, GSAGPXX:TPTKM:SPIS-AA¹⁷-LFI, AAPASXX:VPARL:SPIS-AA¹⁷-LFI, HVPKPXX:APTKL:SPIS-AA¹⁷-LFI, RVPSTXX:APVKT:SPIS-AA¹⁷-LFI, ASAAPXX:VPQAL:SPIS-AA¹⁷-LFI, ASASPXX:VSQDL:SPIS-AA¹⁷-LFI, ASASPXX:VPQDL:SPIS-AA¹⁷-LFI, SSVKXQP:SRVHH:SPIS-AA¹⁷-LFI, RNVQXRP:TQVQL:SPIS-AA¹⁷-LFI, KIPKAXX:APVEL:KPLS-AA¹⁷-LYV, GIPEPXX:APVKM:KPLS-AA¹⁷-LYV, SIPKAXX:APVEL:KPLS-AA¹⁷-LYV, HVTKPTX:APVKL:KPLS-AA¹⁷-LYV, YVPKPXX:APVKL:KPLS-AA¹⁷-LYV, TVPKPXX:APVQL:KPLS-AA¹⁷-LYV, AVPKAXX:APVKL:KPLS-AA¹⁷-LYV, KVGKAXX:APVKL:KPLS-AA¹⁷-LYV, KASKAXX:APVKL:KPLS-AA¹⁷-LYV, GSAGPXX:APVKM:KPLS-AA¹⁷-LYV, AAPASXX:APVRL:KPLS-AA¹⁷-LYV, STPPTXX:APVRL:KPLS-AA¹⁷-LYV, HVPKPXX:APVKL:KPLS-AA¹⁷-LYV, ASAAPXX:APVAL:KPLS-AA¹⁷-LYV, ASASPXX:APVDL:KPLS-AA¹⁷-LYV, KIPKAXX:VPTEL:KPLS-AA¹⁷-LYV, GIPEPXX:VPEKM:KPLS-AA¹⁷-LYV, SIPKAXX:VPTEL:KPLS-AA¹⁷-LYV, HVTKPTX:APTKL:KPLS-AA¹⁷-LYV, YVPKPXX:APTKL:KPLS-AA¹⁷-LYV, TVPKPXX:APTQL:KPLS-AA¹⁷-LYV, AVPKAXX:APTKL:KPLS-AA¹⁷-LYV, KVGKAXX:VPTKL:KPLS-AA¹⁷-LYV, KASKAXX:VPTKL:KPLS-AA¹⁷-LYV, GSAGPXX:TPTKM:KPLS-AA¹⁷-LYV, AAPASXX:VPARL:KPLS-AA¹⁷-LYV, STPPTXX:VPTRL:KPLS-AA¹⁷-LYV, HVPKPXX:APTKL:KPLS-AA¹⁷-LYV, ASAAPXX:VPQAL:KPLS-AA¹⁷-LYV, ASASPXX:VSQDL:KPLS-AA¹⁷-LYV, ASASPXX:VPQDL:KPLS-AA¹⁷-LYV, NDEGLEX:VPTEE:KPLS-AA¹⁷-LYV, NDEGLEX:VPTGQ:KPLS-AA¹⁷-LYV, SSVKXQP:SRVHH:KPLS-AA¹⁷-LYV, RNVQXRP:TQVQL:KPLS-AA¹⁷-LYV, KIPKAXX:VPQEL:EPLP-AA¹⁷-VYY, GIPEPXX:VPQKM:EPLP-AA¹⁷-VYY, SIPKAXX:VPQEL:EPLP-AA¹⁷-VYY, HVTKPTX:VPQKL:EPLP-AA¹⁷-VYY, YVPKPXX:VPQKL:EPLP-AA¹⁷-VYY, TVPKPXX:VPQQL:EPLP-AA¹⁷-VYY, AVPKAXX:VPQKL:EPLP-AA¹⁷-VYY, KVGKAXX:VPQKL:EPLP-AA¹⁷-VYY, KASKAXX:VPQKL:EPLP-AA¹⁷-VYY, GSAGPXX:VPQKM:EPLP-AA¹⁷-VYY, AAPASXX:VPQRL:EPLP-AA¹⁷-VYY, STPPTXX:VPQRL:EPLP-AA¹⁷-VYY, HVPKPXX:VPQKL:EPLP-AA¹⁷-VYY, RVPSTXX:VPQKT:EPLP-AA¹⁷-VYY, ASASPXX:VPQDL:EPLP-AA¹⁷-VYY, KIPKAXX:VPTEL:EPLP-AA¹⁷-VYY, GIPEPXX:VPEKM:EPLP-AA¹⁷-VYY, SIPKAXX:VPTEL:EPLP-AA¹⁷-VYY, HVTKPTX:APTKL:EPLP-AA¹⁷-VYY, YVPKPXX:APTKL:EPLP-AA¹⁷-VYY, TVPKPXX:APTQL:EPLP-AA¹⁷-VYY, AVPKAXX:APTKL:EPLP-AA¹⁷-VYY, KVGKAXX:VPTKL:EPLP-AA¹⁷-VYY, KASKAXX:VPTKL:EPLP-AA¹⁷-VYY, GSAGPXX:TPTKM:EPLP-AA¹⁷-VYY, AAPASXX:VPARL:EPLP-AA¹⁷-VYY, STPPTXX:VPTRL:EPLP-AA¹⁷-VYY, HVPKPXX:APTKL:EPLP-AA¹⁷-VYY, RVPSTXX:APVKT:EPLP-AA¹⁷-VYY, ASASPXX:VSQDL:EPLP-AA¹⁷-VYY, NDEGLEX:VPTEE:EPLP-AA¹⁷-VYY, NDEGLEX:VPTGQ:EPLP-AA¹⁷-VYY, SSVKXQP:SRVHH:EPLP-AA¹⁷-VYY, RNVQXRP:TQVQL:EPLP-AA¹⁷-VYY, KIPKAXX:VSQEL:EPLT-AA¹⁷-LYY, GIPEPXX:VSQKM:EPLT-AA¹⁷-LYY, SIPKAXX:VSQEL:EPLT-AA¹⁷-LYY, HVTKPTX:VSQKL:EPLT-AA¹⁷-LYY, YVPKPXX:VSQKL:EPLT-AA¹⁷-LYY, TVPKPXX:VSQQL:EPLT-AA¹⁷-LYY, AVPKAXX:VSQKL:EPLT-AA¹⁷-LYY, KVGKAXX:VSQKL:EPLT-AA¹⁷-LYY, KASKAXX:VSQKL:EPLT-AA¹⁷-LYY, GSAGPXX:VSQKM:EPLT-AA¹⁷-LYY, AAPASXX:VSQRL:EPLT-AA¹⁷-LYY, STPPTXX:VSQRL:EPLT-AA¹⁷-LYY, HVPKPXX:VSQKL:EPLT-AA¹⁷-LYY, RVPSTXX:VSQKT:EPLT-AA¹⁷-LYY, ASAAPXX:VSQAL:EPLT-AA¹⁷-LYY, ASASPXX:VSQDL:EPLT-AA¹⁷-LYY, KIPKAXX:VPTEL:EPLT-AA¹⁷-LYY, GIPEPXX:VPEKM:EPLT-AA¹⁷-LYY, SIPKAXX:VPTEL:EPLT-AA¹⁷-LYY, HVTKPTX:APTKL:EPLT-AA¹⁷-LYY, YVPKPXX:APTKL:EPLT-AA¹⁷-LYY, TVPKPXX:APTQL:EPLT-AA¹⁷-LYY, AVPKAXX:APTKL:EPLT-AA¹⁷-LYY, KVGKAXX:VPTKL:EPLT-AA¹⁷-LYY, KASKAXX:VPTKL:EPLT-AA¹⁷-LYY, GSAGPXX:TPTKM:EPLT-AA¹⁷-LYY, AAPASXX:VPARL:EPLT-AA¹⁷-LYY, STPPTXX:VPTRL:EPLT-AA¹⁷-LYY, HVPKPXX:APTKL:EPLT-AA¹⁷-LYY, RVPSTXX:APVKT:EPLT-AA¹⁷-LYY, ASAAPXX:VPQAL:EPLT-AA¹⁷-LYY, NDEGLEX:VPTEE:EPLT-AA¹⁷-LYY, NDEGLEX:VPTGQ:EPLT-AA¹⁷-LYY, SSVKXQP:SRVHH:EPLT-AA¹⁷-LYY, RNVQXRP:TQVQL:EPLT-AA¹⁷-LYY, KIPKAXX:VPQEL:EPLT-AA¹⁷-LYY, GIPEPXX:VPQKM:EPLT-AA¹⁷-LYY, SIPKAXX:VPQEL:EPLT-AA¹⁷-LYY, HVTKPTX:VPQKL:EPLT-AA¹⁷-LYY, YVPKPXX:VPQKL:EPLT-AA¹⁷-LYY, TVPKPXX:VPQQL:EPLT-AA¹⁷-LYY, AVPKAXX:VPQKL:EPLT-AA¹⁷-LYY, KVGKAXX:VPQKL:EPLT-AA¹⁷-LYY, KASKAXX:VPQKL:EPLT-AA¹⁷-LYY, GSAGPXX:VPQKM:EPLT-AA¹⁷-LYY, AAPASXX:VPQRL:EPLT-AA¹⁷-LYY, STPPTXX:VPQRL:EPLT-AA¹⁷-LYY, HVPKPXX:VPQKL:EPLT-AA¹⁷-LYY, RVPSTXX:VPQKT:EPLT-AA¹⁷-LYY, ASASPXX:VPQDL:EPLT-AA¹⁷-LYY, NDEGLEX:VPTGQ:SNIT-AA¹⁷-QIM, GIPEPXX:VPEKM:SNIT-AA¹⁷-QIM, HVTKPTX:APTKL:SNIT-AA¹⁷-QIM, YVPKPXX:APTKL:SNIT-AA¹⁷-QIM, TVPKPXX:APTQL:SNIT-AA¹⁷-QIM, AVPKAXX:APTKL:SNIT-AA¹⁷-QIM, GSAGPXX:TPTKM:SNIT-AA¹⁷-QIM, AAPASXX:VPARL:SNIT-AA¹⁷-QIM, HVPKPXX:APTKL:SNIT-AA¹⁷-QIM, RVPSTXX:APVKT:SNIT-AA¹⁷-QIM, ASAAPXX:VPQAL:SNIT-AA¹⁷-QIM, ASASPXX:VSQDL:SNIT-AA¹⁷-QIM, ASASPXX:VPQDL:SNIT-AA¹⁷-QIM, SSVKXQP:SRVHH:SNIT-AA¹⁷-QIM, RNVQXRP:TQVQL:SNIT-AA¹⁷-QIM, RNVQXRP:SRVQL:RSVK-AA¹⁷-AKV, KIPKAXX:VPTEL:RSVK-AA¹⁷-AKV, GIPEPXX:VPEKM:RSVK-AA¹⁷-AKV, SIPKAXX:VPTEL:RSVK-AA¹⁷-AKV, HVTKPTX:APTKL:RSVK-AA¹⁷-AKV, YVPKPXX:APTKL:RSVK-AA¹⁷-AKV, TVPKPXX:APTQL:RSVK-AA¹⁷-AKV, AVPKAXX:APTKL:RSVK-AA¹⁷-AKV, KVGKAXX:VPTKL:RSVK-AA¹⁷-AKV, KASKAXX:VPTKL:RSVK-AA¹⁷-AKV, GSAGPXX:TPTKM:RSVK-AA¹⁷-AKV, AAPASXX:VPARL:RSVK-AA¹⁷-AKV, STPPTXX:VPTRL:RSVK-AA¹⁷-AKV, HVPKPXX:APTKL:RSVK-AA¹⁷-AKV, RVPSTXX:APVKT:RSVK-AA¹⁷-AKV, ASAAPXX:VPQAL:RSVK-AA¹⁷-AKV, ASASPXX:VSQDL:RSVK-AA¹⁷-AKV, ASASPXX:VPQDL:RSVK-AA¹⁷-AKV, NDEGLEX:VPTEE:RSVK-AA¹⁷-AKV, NDEGLEX:VPTGQ:RSVK-AA¹⁷-AKV, RNVQXRP:TQVQL:RSVK-AA¹⁷-AKV, SSVKXQP:TQVHH:RPVQ-AA¹⁷-RKI, KIPKAXX:VPTEL:RPVQ-AA¹⁷-RKI, GIPEPXX:VPEKM:RPVQ-AA¹⁷-RKI, SIPKAXX:VPTEL:RPVQ-AA¹⁷-RKI, HVTKPTX:APTKL:RPVQ-AA¹⁷-RKI, YVPKPXX:APTKL:RPVQ-AA¹⁷-RKI, TVPKPXX:APTQL:RPVQ-AA¹⁷-RKI, AVPKAXX:APTKL:RPVQ-AA¹⁷-RKI, KVGKAXX:VPTKL:RPVQ-AA¹⁷-RKI, KASKAXX:VPTKL:RPVQ-AA¹⁷-RKI, GSAGPXX:TPTKM:RPVQ-AA¹⁷-RKI, AAPASXX:VPARL:RPVQ-AA¹⁷-RKI, STPPTXX:VPTRL:RPVQ-AA¹⁷-RKI, HVPKPXX:APTKL:RPVQ-AA¹⁷-RKI, RVPSTXX:APVKT:RPVQ-AA¹⁷-RKI, ASAAPXX:VPQAL:RPVQ-AA¹⁷-RKI, ASASPXX:VSQDL:RPVQ-AA¹⁷-RKI, ASASPXX:VPQDL:RPVQ-AA¹⁷-RKI, NDEGLEX:VPTEE:RPVQ-AA¹⁷-RKI, NDEGLEX:VPTGQ:RPVQ-AA¹⁷-RKI and SSVKXQP:SRVHH:RPVQ-AA17-RKI; and wherein AA¹⁷ is selected from the group consisting of G, A, V, L, I, P, F, M, W, T and S (in particular is selected from the group consisting of M, I, L, V and T).

[0413] In one example, said cyclic GFR-binding compound is a synthetic molecule as defined herein in the definition section.

[0414] In one particular example, said cyclic GFR-binding compound is a synthetic peptide, or a variant or analog thereof, or a cyclic peptidomimetic.

[0415] In one most particular example, said cyclic GFR-binding compound is a cyclic synthetic peptide.

[0416] In one example, a length of said cyclic GFR-binding compound, in solution, such as in a physiologically acceptable solvent such as water or PBS, is comprised between about 6 and about 20 nm, preferably between about 6 and about 16 nm, as determined using the standard «3D» procedure described above.

[0417] In one particular example, said cyclic GFR-binding compounds may be any one of peptides of SEQ ID NO: 4717 to 13498.

[0418] LINKER Suitable for Implementing Cyclic GFR-Compounds' Embodiments

[0419] In one particular example, said LINKER has a Mw comprised between 450 and 4,500 Daltons, in particular comprised between about 600 and about 4,500 Da, more particularly between about 600 and about 4,000 Da, and even more particularly between about 600 and about 3,500 Da.

[0420] The chemical nature of said LINKER is not meant to be particularly limited and may be any organic molecule capable of covalently connecting two ends of a peptide or a peptidomimetic such as PEP(A) or PEP(C)-PEP12 so as to form a cyclic compound and so long as LINKER provides sufficient cycle stability for the pharmaceutical association, combination or composition as defined herein to promote the conversion or recoding of a neoplastic cell into a non-neoplastic cell. LINKER may thus be, for example, in certain embodiments, a peptide, or variant, analog or peptidomimetic thereof, a polysaccharide, a polynucleotide, a saturated or unsaturated hydrocarbon chain, or a mixture thereof.

[0421] For example, in certain embodiments, LINKER is a peptide with 6 to 31 amino acids. In one particular example, LINKER is a peptide with 6 to 25 amino acids. In one particular example, LINKER is a peptide with 8 to 25 amino acids. In one most particular example, LINKER is a peptide with 8 to 20 amino acids.

[0422] Thus, in one particular example, said cyclic GFR-binding compound is a peptide, a variant or analog thereof as defined herein, with between 10-60 (in particular between 15-60, more particularly between 10-55, and even more particularly between 15-55) amino acids or with between 10-35 (in particular between 15-35, more particularly between 10-30, and even more particularly between 15-30) amino acids, comprising a peptide, a variant or analog thereof of general formula (IIIa); wherein one end of LINKER interacts covalently with one end of PEP(A); wherein PEP(A) comprises PEP1 or PEP12; wherein LINKER is a peptide comprising 6 to 31 amino acids (in particular 6 to 25, 8 to 25, or 8 to 20 amino acids).

[0423] Thus, in one particular example, said cyclic GFR-binding compound is a cyclic peptide, a variant or analog thereof, or a cyclic peptidomimetic as defined herein, with between 10-60 (in particular between 15-60, more particularly between 10-55, and even more particularly between 15-55) amino acids or with between 10-35 (in particular between 15-35, more particularly between 10-30, and even more particularly between 15-30) amino acids, comprising a peptide, a variant or analog thereof, or a peptidomimetic having the following general formula (IIIb); wherein one end of a first LINKER interacts covalently with one end of PEP(A); wherein one end of a second LINKER interacts covalently with another end of PEP(A); wherein another end of a first LINKER interacts covalently with another end of a second LINKER; wherein PEP(A) comprises PEP1 or PEP12; wherein LINKER are independently a peptide comprising 6 to 31 amino acids (in particular 6 to 25, 8 to 25, or 8 to 20 amino acids).

[0424] Thus, in one particular example, said cyclic GFR-binding compound is a peptide, a variant or analog thereof as defined herein, with between 10-60 (in particular between 15-60, more particularly between 10-55, and even more particularly between 15-55) amino acids or with between 10-35 (in particular between 15-35, more particularly between 10-30, and even more particularly between 15-30) amino acids, comprising a peptide, a variant or analog thereof of general formula (IVa); wherein LINKER is a peptide comprising 6 to 31 amino acids (in particular 6 to 25, 8 to 25, or 8 to 20 amino acids); wherein PEP12 is a peptide with 8 amino acids of formula PEP1-AA¹⁷-PEP11 as already defined herein; wherein PEP1, PEP11 and PEP(C) are as already defined herein; wherein AA¹³ may be an N-terminal amino acid or a C-terminal amino acids; wherein AA²⁰ may be an N-terminal amino acid or a C-terminal amino acid; wherein one end of LINKER interacts covalently with one end of PEP12 via AA²⁰; wherein another end of LINKER interacts covalently with one end of PEP(C); wherein another end of PEP(C) interacts covalently with PEP12 via AA¹³.

[0425] Thus, in one particular example, said cyclic GFR-binding compound is a cyclic peptide, a variant or analog thereof, or a cyclic peptidomimetic as defined herein, with between 10-60 (in particular between 15-60, more particularly between 10-55, and even more particularly between 15-55) amino acids or with between 10-35 (in particular between 15-35, more particularly between 10-30, and even more particularly between 15-30) amino acids, comprising a peptide, a variant or analog thereof, or a peptidomimetic having the following general formula (IVb); wherein LINKER are independently a peptide comprising 6 to 31 amino acids (in particular 6 to 25, 8 to 25, or 8 to 20 amino acids); wherein PEP12 is a peptide with 8 amino acids of formula PEP1-AA¹⁷-PEP11 as defined herein; wherein PEP2 is a peptide with five amino acids as already defined herein; wherein one end of PEP(C) interacts covalently with PEP12 via one end of PEP1; wherein one end of a first LINKER interacts covalently with one end of PEP12 via one end of PEP11; wherein one end of a second LINKER interacts covalently with another end of PEP(C); wherein another end of a first LINKER interacts covalently with another end of a second LINKER; wherein PEP(C) is a peptide with at least 5 amino acids, in particular a peptide with between 5 and 12 amino acids.

[0426] Thus, in one particular example, said cyclic GFR-binding compound is a peptide, a variant or analog thereof as defined herein, with between 10-60 (in particular between 15-60, more particularly between 10-55, and even more particularly between 15-55) amino acids or with between 10-35 (in particular between 15-35, more particularly between 10-30, and even more particularly between 15-30) amino acids, having any one of the general formula (VII) to (XXIII); wherein LINKER is a peptide comprising 6 to 31 amino acids (in particular 6 to 25, 8 to 25, or 8 to 20 amino acids).

[0427] In certain embodiments, said cyclic GFR-binding compound is a cyclic peptidomimetic as defined herein, with between 10-60 (in particular between 15-60, more particularly between 10-55, and even more particularly between 15-55) amino acids or with between 10-35 (in particular between 15-35, more particularly between 10-30, and even more particularly between 15-30) amino acids, of general formula (IVa) or (IVb); wherein LINKER is not a peptide but may comprise amino acids or peptides in covalent or non-covalent (preferably covalent) association with other groups or residues other than amino acids or peptides.

[0428] In one particular example, LINKER comprises (or is) a peptide of general formula (XXIV):

*AA²⁰¹-AA²⁰²-AA²⁰³-AA²⁰⁴-AA²⁰⁵-AA²⁰⁶-AA²⁰⁷-AA²⁰⁸-AA²⁰⁹** (XXIV)

[0429] wherein said peptide of formula (XXIV) may be selected from the group consisting of *AA^{III}-AA^{I}-AA^{I}-AA^{II}-AA^{VII}-AA^{XII}-AA^{XII}-AA^{XIII}-AA^{XIII}**, *AA^{III}-AA^{I}-AA^{VI}-AA^{II}-AA^{VII}-AA^{XII}-AA^{XII}-A^{XIII}-AA^{XIII}**, *AA^{III}-AA^{I}-AA^{I}-AA^{II}-AA^{II}-AA^{XII}-AA^{XII}-AA^{XIII}-AA^{XIII}**, *AA^{III}-AA^{I}-AA^{II}-AA^{II}-AA^{VII}-AA^{XII}-AA^{XII}-AA^{XIII}-AA^{XIII}**, *AA^{III}-AA^{I}-AA^{II}-AA^{IV}-AA^{IV}-AA^{XII}-AA^{XII}AA^{XIII}-AA^{XII}**, *AA^{II}-AA^{I}-AA^{II}-AA^{II}-AA^{II}-AA^{XII}-AA^{XII}-AA^{XIII}-AA^{XIII}**, *AA^{III}-AA^{III}-AA^{II}-AA^{VII}-AA^{II}-AA^{XII}-AA^{XII}-AA^{XIII}-AA^{XIII}**, *AA^{III}-AA^{I}-AA^{I}-AA^{II}-AA^{II}-AA^{XII}-AA^{XII}-AA^{XIII}-AA^{XIII}**, *AA^{V}-AA^{V}-AA^{VII}-AA^{VII}-AA^{XII}-AA^{XII}-AA^{XIII}-AA^{XIII}**, *AA^{VIII}-AA^{V}-AA^{VII}-AA^{II}-AA^{XII}-AA^{XII}-AA^{XIII}-AA^{XIII}** and *AA^{V}-AA^{V}-AA^{VII}-AA^{II}-AA^{XII}-AA^{XII}-AA^{XIII}-AA^{XIII}**; wherein AA^{I} is any amino acid as defined herein, AA^{II} is any polar amino acid as defined herein, AA^{III} is any acidic amino acid as defined herein, AA^{IV} is any aliphatic amino acid as defined herein, AA^{V} is any apolar amino acid as defined herein, AA^{VI} is any aromatic amino acid as defined herein, AA^{VII} is any basic amino acid as defined herein, AA^{VIII} is L or I as defined herein, AA^{XII} is an amino acid selected from the group consisting of G, A, V, L, I, P, M, K, R, H, Y and E, wherein AA^{XIII} is absent, AA^{II} or AA^{VII}, preferably absent; and wherein any one of the fragment AA²⁰¹, AA²⁰¹-AA²⁰², AA²⁰¹-AA²⁰²-AA²⁰³, AA²⁰¹-AA²⁰²-AA²⁰³-AA²⁰⁴, AA²⁰¹-AA²⁰²-AA²⁰³-AA²⁰⁴-AA²⁰⁵, AA²⁰¹-AA²⁰²-AA²⁰³-AA²⁰⁴-AA²⁰⁵-AA²⁰⁶, AA²⁰¹-AA²⁰²-AA²⁰³-AA²⁰⁴-AA²⁰⁵-AA²⁰⁶-AA²⁰⁷, AA²⁰³-AA²⁰⁴-AA²⁰⁵-AA²⁰⁶-AA²⁰⁷-AA²⁰⁸-AA²⁰⁹, AA²⁰⁴-AA²⁰⁵-AA²⁰⁶-AA²⁰⁷-AA²⁰⁸-AA²⁰⁹, AA²⁰⁵-AA²⁰⁶-AA²⁰⁷-AA208-AA²⁰⁹, AA²⁰⁶-AA²⁰⁷-AA²⁰⁸-AA²⁰⁹, AA²⁰⁷-AA208-AA²⁰⁹, AA²⁰⁸-AA²⁰⁹ or AA²⁰⁹, may be absent. In the peptides of formula (XXIV), any one of the amino acid labelled “*” or the amino acid labelled “**” is an N-terminal amino acid and the other is a C-terminal amino acid.

[0430] For instance, in the peptide of formula *A^{III}-A^{I}-A^{I}-A^{II}-A^{VII}-A^{XII}-A^{XII}-A^{XIII}-A^{XIII}** (XXIV-1), AA^{III} occupies position AA²⁰¹, *AA^{I} occupies position AA²⁰², AA^{I} occupies position AA²⁰³, AA^{II} occupies position AA²⁰⁴, AA^{VII} occupies position AA²⁰⁵, AA^{XII} occupies position AA²⁰⁶, AA^{XII} occupies position AA²⁰⁷, AA^{XIII} occupies position AA²⁰⁶ and AA^{XIII}** occupies position AA²⁰⁹.

[0431] Likewise, in the peptide of formula *AA^{V}-AA^{V}-AA^{VII}-AA^{II}-AA^{XII}-AA^{XII}-AA^{XIII}-AA^{XIII}** (XXIV-1) AA^{V} occupies position AA²⁰¹, AA^{V} occupies position AA²⁰², AA^{VII} occupies position AA²⁰³, AA^{II} occupies position AA²⁰⁴, AA^{XII} occupies position AA²⁰⁵, A^{XII} occupies position AA²⁰⁶, AA^{XIII} occupies position AA²⁰⁷, AA^{XIII} occupies position AA²⁰⁸and position AA²⁰⁹ is vacants.

[0432] In one example, LINKER may thus comprise or be any one of the following peptides:

[0433] *AA²⁰¹-AA²⁰²-AA²⁰³-AA²⁰⁴-AA²⁰⁵-AA²⁰⁶-AA²⁰⁷-AA²⁰⁸** (XXIV-1); *AA²⁰¹-AA²⁰²-AA²⁰³-AA²⁰⁴-AA²⁰⁵-AA²⁰⁶-AA²⁰⁷** (XXIV-2); *AA²⁰¹-AA²⁰²-AA²⁰³-AA²⁰⁴-AA²⁰⁵-AA²⁰⁶** (XXIV-3); *AA²⁰¹-AA²⁰²-AA²⁰³-AA²⁰⁴-AA²⁰⁵** (XXIV-4); *AA²⁰¹-AA²⁰²-AA²⁰³-AA²⁰⁴** (XXIV-5); *AA²⁰¹-AA²⁰²-AA²⁰³** (XXIV-6); *AA²⁰¹-AA²⁰²** (XXIV-7); *AA²⁰²-AA²⁰³-AA²⁰⁴-AA²⁰⁵-AA²⁰⁶-AA²⁰⁷-AA²⁰⁸-AA²⁰⁹** (XXIV-8); *AA²⁰³-AA²⁰⁴-AA²⁰⁵-AA²⁰⁶-AA²⁰⁷-AA²⁰⁸-AA²⁰⁹** (XXIV-9); *AA²⁰⁴-AA²⁰⁵-AA²⁰⁶-AA²⁰⁷-AA²⁰⁸-AA²⁰⁹** (XXIV-10); *AA²⁰⁵-AA²⁰⁶-AA²⁰⁷-AA²⁰⁸-AA²⁰⁹** (XXIV-11); *AA²⁰⁶-AA²⁰⁷-AA²⁰⁸-AA²⁰⁹** (XXIV-12); *AA²⁰⁷-AA²⁰⁸-AA²⁰⁹** (XXIV-13); *AA²⁰⁸-AA²⁰⁹** (XXIV-14); wherein, for instance, said peptide of formulae (XXIV-1) may thus be selected from the group consisting of *AA^{III}-AA^{I}-AA^{I}-AA^{II}-AA^{VII}-AA^{XII}-AA^{XII}-AA^{XIII}**, *AA^{III}-AA^{I}-AA^{VI}-AA^{II}-AA^{VII}-A^{XII}-AA^{XII}-AA^{XIII}**, *AA^{III}-AA^{I}-AA^{I}-AA^{II}-AA^{II}-AA^{XII}-AA^{XII}-AA^{XIII}**, *AA^{III}-AA^{I}-AA^{II}-AA^{II}-AA^{VII}-AA^{XII}-AA^{XII}-AA^{XIII}**, *AA^{III}-AA^{I}-AA^{II}-AA^{IV}-AA^{IV}-AA^{XII}-AA^{XII}-AA^{XIII}**, *AA^{II}-AA^{I}-AA^{II}-AA^{II}-AA^{II}-AA^{XII}-AA^{XII}-AA^{XIII}**, *AA^{III}-AA^{III}-AA^{II}-AA^{VII}-AA^{II}- AA^{XII}-AA^{XII}-AA^{XIII}**, *AA^{III}-AA^{I}-AA^{I}-AA^{II}-AA^{II}-AA^{XII}-AA^{XII}-AA^{XIII}**, *AA^{V}-AA^{V}-AA^{VII}-AA^{VII}-AA^{XII}-AA^{XII}-AA^{XIII}**, *AA^{VIII}-AA^{V}-AA^{VII}-AA^{II}-AA^{XII}-AA^{XII}-AA^{XIII}** and *AA^{V}-AA^{V}-AA^{VII}-AA^{II}-AA^{XII}-AA^{XII}-AA^{XIII}**.

[0434] In one particular example, LINKER comprises a peptide of formula (XXIV), (XXIV-2) or (XXIV-4).

[0435] In one example, LINKER comprises (or is) a poly-(aliphatic amino acid) peptide such as poly-alanine peptide (A)ₙ, or a poly-glycine (G)ₙ, n being an integer comprised between 2 and 31, in particular between 2 to 25, more particularly between 2 and 20, such as A-A-A-A-A-A-A-A-A, A-A-A-A-A-A-A, A-A-A-A-A, G-G-G-G-G-G-G-G-G, G-G-G-G-G-G-G or G-G-G-G-G.

[0436] In one particular example, LINKER comprises (or is) a peptide of general formulae (XXIV) to (XXIV-14), more particularly (XXIV), (XXIV-2) or (XXIV-4), and/or a poly-(aliphatic amino acid), peptide as defined herein.

[0437] For example, in certain embodiments, LINKER is a polysaccharide comprising 6 to 31 saccharides. In one particular example, LINKER is a polysaccharide comprising 6 to 25 saccharides. In one particular example, LINKER is a polysaccharide comprising 8 to 25 saccharides. In one most particular example, LINKER is a polysaccharide comprising 8 to 20 saccharides. Suitable monosaccharides include, but are not limited to, glucose (dextrose), fructose (levulose) and galactose. Monosaccharides are the building blocks of disaccharides (such as sucrose) and polysaccharides (such as celluloses, chitosans, ulvanes and starches). Further, each carbon atom that supports a hydroxyl group (except for the first and last) is chiral, giving rise to a number of isomeric forms all with the same chemical formula. A large number of biologically important modified monosaccharides exists e.g. amino sugars such as Galactosamine, Glucosamine, Sialic acid, N-Acetylglucosamine, and sulfosugars such as Sulfoquinovose. All of these monosaccharide and polysaccharide derivatives may be used as LINKER in the present invention.

[0438] For example, in certain embodiments, LINKER is a polynucleotide comprising 6 to 31 nucleotides. In one particular example, LINKER is a polynucleotide comprising 6 to 25 nucleotides. In one particular example, LINKER is a polynucleotide comprising 8 to 25 nucleotides. In one most particular example, LINKER is a polynucleotide comprising 8 to 20 nucleotides. Suitable nucleotides include adenine (A), guanine (G), thymine (T), cytosine (C), uracil (U) and derivatives, analogues and/or mimetic thereof.

[0439] For example, in certain embodiments, LINKER is a saturated or unsaturated hydrocarbon chain comprising between 16 and 60, between 16 and 45, or between 16 and 30 carbon atoms, wherein said hydrocarbon chain is optionally interrupted by one or more non-carbon atom, preferably between 1 and 16, between 1 and 12 or between 1 and 8 non-carbon atoms as appropriate, wherein said non-carbon atom is selected from the group consisting of —O—, —S—, —C(═O), —SO₂—, —N(Ri)(C═O)—, and —N(Ri)-, wherein Ri is selected from the group consisting of a hydrogen atom, a C1-C6 alkyl group and an aryl group, and wherein said hydrocarbon chain is non-substituted or substituted by at least one radical selected from the group consisting of a halogen, a monosaccharide, a poly(1-6)saccharide, a nucleotide, a poly(1-6)nucleotide, a C1-C10 alkyl group and an aryl group.

[0440] In one example, LINKER is a saturated or unsaturated hydrocarbon chain of at most 10 nanometres (nm) in length, preferably at most 144 nanometres (nm) in length, in particular at most 120 nm, 96 nm, 84 nm or 72 nm as determined using the standard «2D» procedure described above.

[0441] In one example, such saturated or unsaturated hydrocarbon chains include polyethylene glycol (PEG) or any one of its derivatives.

[0442] More particularly, LINKER is a octapeptide (8 amino acids). More particularly, LINKER is a nonapeptide (9 amino acids). More particularly, LINKER is a decapeptide (10 amino acids). More particularly, LINKER is a hendecapeptide (11 amino acids). More particularly, LINKER is a dodecapeptide (12 amino acids). More particularly, LINKER is a tridecapeptideo (13 amino acids). More particularly, LINKER is a tetradecapeptide (14 amino acids). More particularly, LINKER is a pentadecapeptide (15 amino acids). More particularly, LINKER is a hexadecapeptide (16 amino acids). More particularly, LINKER is a heptadecapeptide (17 amino acids). More particularly, LINKER is an octadecapeptide (18 amino acids). More particularly, LINKER is an enneadecapeptide (19 amino acids). More particularly, LINKER is an icosapeptide (20 amino acids).

[0443] In one particular example, LINKER comprises one or more of a peptide selected from the group consisting of DENEKVV, DENKNVV, DEYDKVV, DDSSNVI, DSSNNVI, DDMGVPT, DKGVVTY, NDKQQII, DAANNVV, DSANNVV, DDSSNVI, DNGRVLL, VGRKPKV, IGKTPKI, VGRTPKV, RIKPHQGQH, EYVRKKPKL, EIVRKKPIF, EYVRKKP, EIVRKKP, polyalanine (A₁₋₁₂) (preferably A₂₋₈) and polyglycine (G₁₋₁₂) (preferably G₂₋₈).

[0444] For example, in certain embodiments, to synthetise cyclic GFR-binding compounds of the present disclosure, the covalent bonds between e.g. LINKER, PEP(A), PEP(C) or PEP1 to PEP12, may be created through the chemical reaction between a free amine moiety e.g. of a N-terminal amino acid (—NH₂ or —NH₃X, X generally being a halide anion selected from the group consisting of F⁻, CF⁻ and Br⁻), typically acting as a nucleophile, and an electrophile moiety of e.g. a C-terminal amino acid. Such an electrophile moiety includes, but is not limited to, alkyl halides (—CR₂—X), alcohols (—CR₂—OH), acid chlorides (—C(═O)X), esters, (—C(═O)OR), phosphate (—OP(OR)₃), phosphinate (—OP(OR)R₂), phosphonates (—OP(OR)₂R), phosphonite (—P(OR)₂R) or sulfonic esters (—SO₂OR). More particularly, this covalent bond is an amide bond (in particular a peptide bond) formed through conventional peptide synthesis using conventional coupling reagents as already defined herein.

[0445] For example, in certain embodiments, to synthetise cyclic GFR-binding compounds of the present disclosure, the covalent bonds between e.g. LINKER, PEP(A), PEP(C) or PEP1 to PEP12, may be created through the chemical reaction between a free carboxylic acid moiety e.g. of a C-terminal amino acid (—CO₂H or —CO₂X, X generally being an inorganic cation such as alkaline cations (e.g. Li⁺, Na⁺ or K⁺) or an organic cation such as ammonium cations), typically acting as an electrophile, and a nucleophile moiety of e.g. an N-terminal amino acid. Such a nucleophile moiety includes, but is not limited to, alcohols (—OH), amines (—NH₂), phosphines (—PR₃), thiols (—SH). More particularly, this covalent interaction is a peptide bond formed through conventional peptide synthesis using conventional coupling reagents as already defined herein.

[0446] Cyclisation of a cyclic GFR-binding compound of the present disclosure may be carried out as described above using conventional peptide bond formation procedures, click chemistry, formation of disulphide bonds, etc.

[0447] The present disclosure provides pharmaceutical associations, combinations and compositions, methods and uses for converting or recoding any neoplastic cell into a non-neoplastic cell (in particular, a functional and healthy cell) of any type. In some cases, the cell type of the converted or recoded non-neoplastic cell may be selected/chosen by e.g. a person providing the treatment to a subject.

[0448] In one example, said pharmaceutical association, combination or composition induces the conversion of a neoplastic cell into a physiologically functional and/or healthy cell of any cell lineage including, but not limited to, bone cell, chondrocytic cell, neuron cell, fibroblast, vascular cell, ligament cell, tendon cell, epithelial cell, retina photoreceptor cell, muscle cell, glandular cell, myoepithelial cell, subepithelial interstitial cell, smooth muscle cell, blood cell, gastrointestinal cell, adipocyte, Sertoli cells, Leydig cell, Germ cell and renal cell lineages. Such cells include any progenitor or precursor cells or any partially or fully differentiated cells of these lineages. More generally, the present disclosure includes the treatment of any neoplastic cell of any type and cell lineage using the associations, combinations, compositions, methods and uses as defined herein.

[0449] For example, in certain embodiments, a neoplastic cell of a bone tissue (i.e. a neoplastic cell from the bone cell lineage) has been, may be or will be the cause of the development of a neoplastic bone disease (e.g. bone cancer). Inducing the conversion of this neoplastic bone cell into a physiologically functional and/or healthy cell (any physiologically functional and/or healthy cell) of the bone cell lineage may protect a subject/patient carrying this cell from bone cancer. In some cases, it may be preferable and/or satisfying and/or more practical to induce the conversion of a neoplastic bone cell into a functional and/or healthy cell of a different cell lineage i.e. not a cell from a bone lineage, such as, for example, in certain embodiments, a cell from a chondrocytic cell lineage, a fibroblast lineage or a ligament/tendon cell lineage.

[0450] In one example, a neoplastic cell of a soft tissue such as a muscle, vascular, skin or kidney tissue (i.e. a neoplastic cell from the muscle, vascular, skin or kidney cell lineage, respectively) has been, may be or will be the cause of the development of a neoplastic muscle, vascular, skin or kidney disease (e.g. Rhabdomyosarcoma, Hemangiosarcoma, basal cell carcinoma or Squamous cell carcinoma, respectively). Inducing the conversion of any of these neoplastic cells into a physiologically functional and/or healthy cell (any physiologically functional and/or healthy cell) of the muscle, vascular, skin or kidney cell lineage, respectively, may protect a subject carrying any of these cells from the diseases mentioned above. In some cases, it may be preferable and/or satisfying and/or more practical to induce the conversion of, e.g. a neoplastic muscle, vascular, skin or kidney cell into a functional and/or healthy cell of a different cell lineage i.e. not a cell from a muscle, vascular, skin or kidney lineage, such as, for example, in certain embodiments, a cell from a bone cell lineage so that a medical practitioner such as a surgeon, may be able to surgically remove the newly converted bone cells more conveniently. The surgery may be carried out purely for aesthetic reasons and/or because of a discomfort and/or to avoid the possibility of e.g. infections, complications, etc.

[0451] For example, in certain embodiments, a neoplastic cell of an adipose tissue (i.e. a neoplastic cell from the adipocyte lineage) has been, may be or will be the cause of the development of a neoplastic adipose tissue disease (e.g. adipose tissue cancer or lipoma). Several treatment routes may be envisaged to induce the conversion of this neoplastic adipocyte into a physiologically functional and/or healthy cell and thus protect a subject/patient carrying this cell from a lipoma. In some cases, it may be preferable and/or satisfying and/or more practical to induce the conversion of the neoplastic adipocyte into a functional and/or healthy cell of a bone cell lineage. Once the treatment has been completed i.e. after the conversion of the neoplastic adipocyte into a non-neoplastic bone cell (e.g. an osteocyte) has taken place, surgical removal of the newly converted bone cells may be performed for e.g. aesthetic reasons and/or because of a discomfort and/or to avoid the possibility of e.g. infections, complications, etc. In other cases, it may be preferable and/or satisfying and/or more practical to induce the conversion of the neoplastic adipocyte into a functional and/or healthy cell of a muscle cell lineage. Because the conversion of the neoplastic adipocyte into a non-neoplastic muscle cell (e.g. a myocyte) does not yield hard tissues such as osteocytes, the patient would generally not feel any substantial discomfort and therefore, the surgical removal of the newly converted muscle cells may be avoided, although it may still be performed if the patient were to feel even the slight discomfort. The necessity of performing surgery following the presently defined recoding treatment would generally be left to the appreciation of the patient upon supervision of a medical practitioner.

[0452] The present disclosure thus provides methods to convert or recode a neoplastic cell of a specific tissue/cell type (e.g. bone, cartilage, neuron, prostate, ovary, muscle, skin, vascular, ligament, tendon, eye retina, kidney, head, neck, blood, gastrointestinal, lung and adipose tissues) into a non-neoplastic cell of any tissue/cell type (e.g. bone, cartilage, neuron, prostate, ovary, muscle, skin, vascular, ligament, tendon, eye retina and kidney).

[0453] II.3. Induction Into a Cell of a Specific Cell Lineage

[0454] Bone Cell Lineage

[0455] Certain embodiments of the invention are particularly useful for inducing the conversion of a neoplastic cell into a cell (any cell) of a bone cell lineage.

[0456] In certain embodiments useful for inducing the conversion of a neoplastic cell into a cell (any cell) of a bone cell lineage, PEP1 is selected from the group consisting of SAIS, NAIS, SATS and SPIS.

[0457] In certain embodiments useful for inducing the conversion of a neoplastic cell into a cell (any cell) of a bone cell lineage, PEP3 is selected from the group consisting of VPT, APT, VPQ, VSQ and TQV.

[0458] In certain embodiments useful for inducing the conversion of a neoplastic cell into a cell (any cell) of a bone cell lineage, PEP5 is a peptide of general formula PEP3-AA¹¹-AA¹²; wherein PEP3 is selected from the group consisting of VPT, APT, VPQ, VSQ and TQV; wherein AA¹¹ is selected from the group consisting of E, K, Q, R, A, D, G and H, in particular E, K, Q, A and D; wherein AA¹² is selected from the group consisting of L, M, T, E, Q and H, in particular L. In one particular example, PEP5 is selected from the group consisting of VPTEL, APTKL, APTQL, VPTKL, VPQAL, VSQDL, VPQDL and TQVQL.

[0459] In certain embodiments useful for inducing the conversion of a neoplastic cell into a cell (any cell) of a bone cell lineage, PEP7 is an amino acid or a peptide with between two and seven amino acids of general formula AA¹-AA²-AA³-AA⁴-AA⁵-AA⁶-AA⁷; wherein AA¹, AA², AA³, AA⁴, and AA⁵ are independently absent or AA^{I} as defined herein; wherein AA⁶ is absent or selected from the group consisting of S, T, C, E, Q, P and R, preferably C, S, T or R; wherein AA⁷ is absent or is selected from the group consisting of S, T, C, E, Q, P and R, preferably is selected from the group consisting of C, S and P; and wherein at least one of AA¹, AA², AA³, AA⁴, AA⁵, AA⁶ or AA⁷ is not absent. In one particular example, PEP7 is selected from the group consisting of KIPKAXX, SIPKAXX, HVTKPTX, YVPKPXX, TVPKPXX, AVPKAXX, KVGKAXX, ASAAPXX, ASASPXX and RNVQXRP.

[0460] In certain embodiments useful for inducing the conversion of a neoplastic cell into a cell (any cell) of a bone cell lineage, PEP9 is a peptide of general formula AA¹-AA²-AA³-AA⁴-AA⁵-AA⁶-AA⁷-PEP5; wherein PEP5 is a peptide of formula PEP3-AA¹¹-AA¹²; wherein PEP3 is selected from the group consisting of VPT, APT, VPQ, VSQ and TQV; wherein AA¹¹ is selected from the group consisting of E, K, Q, R, A, D, G and H, in particular E, K, Q, A and D; wherein AA¹² is selected from the group consisting of L, M, T, E, Q and H, in particular L; wherein AA¹, AA², AA³, AA⁴, and AA⁵ are independently absent or AA^{I} as defined herein; wherein AA⁶ is absent or selected from the group consisting of S, T, C, E, Q, P and R, preferably C, S, T or R; wherein AA⁷ is selected from the group consisting of S, T, C, E, Q, P and R, preferably is selected from the group consisting of C, S and P. In one particular example, PEP9 is selected from the group consisting of KIPKAXXVPTEL, SIPKAXXVPTEL, HVTKPTXAPTKL, YVPKPXXAPTKL, TVPKPXXAPTQL, AVPKAXXAPTKL, KVGKAXXVPTKL, ASAAPXXVPQAL, ASASPXXVSQDL, ASASPXXVPQDL and RNVQXRPTQVQL.

[0461] In certain embodiments useful for inducing the conversion of a neoplastic cell into a cell (any cell) of a bone cell lineage, PEP12 is a peptide of general formula PEP1-AA¹⁷-PEP11; wherein AA¹⁷ is selected from the group consisting of G, A, V, L, I, P, F, M, W, T and S (in particular is selected from the group consisting of M, I, L, V and T); wherein PEP1 is selected from the group consisting of SAIS, NAIS, SATS and SPIS.

[0462] In certain embodiments useful for inducing the conversion of a neoplastic cell into a cell (any cell) of a bone cell lineage, PEP11 is a peptide with 3 amino acids of general formula AA¹⁸-AA¹⁹-AA²⁰; wherein AA¹⁸ is selected from the group consisting of L, V, Q, A and R, in particular is L; wherein AA¹⁹ is selected from the group consisting of F, W, H and Y (in particular is an aromatic, polar amino acid such as Y); wherein AA²⁰ is selected from the group consisting of L, F, Y, K, I, V and M, in particular is selected from the group consisting of L, F, Y, and K. In one particular example, PEP11 is selected from the group consisting of LYL, LYF, LYY and LYK.

[0463] In certain embodiments useful for inducing the conversion of a neoplastic cell into a cell (any cell) of a bone cell lineage, PEP1 is selected from the group consisting of SAIS, NAIS, SATS and SPIS; PEP11 is selected from the group consisting of LYL, LFF, LYF, LYY, LYK, LYI, LFI, LYV, VYY, QIM, AKV and RKI; and the pair PEP1:PEP11 is selected from the group consisting of SAIS:LYL, NAIS:LYF, SATS:LYY and SPIS:LYK.

[0464] The definitions of “PEP” pairs and triplets e.g. PEP3:PEP1, PEP5:PEP12, or PEP7:PEP5:PEP1, most particularly useful for inducing the conversion of a neoplastic cell into a cell (any cell) of a bone cell lineage, are as already defined herein to the extent that PEP1, PEP3, PEP5, PEP7, PEP9, PEP11 and PEP12 are particularly useful for these applications as defined in the present bone section.

[0465] In certain embodiments useful for inducing the conversion of a neoplastic cell into a cell (any cell) of a bone cell lineage, said GFR-binding compound is a synthetic molecule as defined herein in the definition section.

[0466] In certain embodiments useful for inducing the conversion of a neoplastic cell into a cell (any cell) of a bone cell lineage, said GFR-binding compound is a synthetic peptide, or a variant or analog thereof, or a peptidomimetic.

[0467] Chondrocytic Cell Lineage

[0468] Certain embodiments of the invention are particularly useful for inducing the conversion of a neoplastic cell into a cell (any cell) of a chondrocytic cell lineage.

[0469] In certain embodiments useful for inducing the conversion of a neoplastic cell into a cell (any cell) of a chondrocytic cell lineage, PEP1 is selected from the group consisting of SAIS, NAIS, SPIS, EPLP and EPLT.

[0470] In certain embodiments useful for inducing the conversion of a neoplastic cell into a cell (any cell) of a chondrocytic cell lineage, PEP3 is selected from the group consisting of VPT, APT, VPQ and VSQ.

[0471] In certain embodiments useful for inducing the conversion of a neoplastic cell into a cell (any cell) of a chondrocytic cell lineage, PEP5 is a peptide of general formula PEP3-AA¹¹-AA¹²; wherein PEP3 is selected from the group consisting of VPT, APT, VPQ and VSQ; wherein AA¹¹ is selected from the group consisting of E, K, Q, R, A, D, G and H, in particular E, K, Q, R, A and D; wherein AA¹² is selected from the group consisting of L, M, T, E, Q and H, in particular is L. In one particular example, PEP5 is selected from the group consisting of VPTEL, APTKL, APTQL, VPTRL, VPQAL, VSQDL and VPQDL.

[0472] In certain embodiments useful for inducing the conversion of a neoplastic cell into a cell (any cell) of a chondrocytic cell lineage, PEP7 is an amino acid or a peptide with between two and seven amino acids of general formula AA¹-AA²-AA³-AA⁴-AA⁵-AA⁶-AA⁷; wherein AA¹, AA², AA³, AA⁴, and AA⁵ are independently absent or AA^{I} as defined herein; wherein AA⁶ is absent or selected from the group consisting of S, T, C, E, Q, P and R, preferably is S, C or T; wherein AA⁷ is absent or is selected from the group consisting of S, T, C, E, Q, P and R, preferably is S or C; and wherein at least one of AA¹, AA², AA³, AA⁴, AA⁵, AA⁶ or AA⁷ is not absent. In one particular example, PEP7 is selected from the group consisting of KIPKAXX, SIPKAXX, HVTKPTX, YVPKPXX, TVPKPXX, STPPTXX, ASAAPXX and ASASPXX.

[0473] In certain embodiments useful for inducing the conversion of a neoplastic cell into a cell (any cell) of a chondrocytic cell lineage, PEP9 is a peptide of general formula AA¹-AA²-AA³-AA⁴-AA⁵-AA⁶-AA⁷-PEP5; wherein PEP5 is a peptide of formula PEP3-AA¹¹-AA¹²; wherein PEP3 is selected from the group consisting of VPT, APT, VPQ and VSQ; wherein AA¹¹ is selected from the group consisting of E, K, Q, R, A, D, G and H, in particular E, K, Q, R, A and D; wherein AA¹² is selected from the group consisting of L, M, T, E, Q and H, in particular is L; wherein AA¹, AA², AA³, AA⁴, and AA⁵ are independently absent or AA^{I} as defined herein; wherein AA⁶ is absent or selected from the group consisting of S, T, C, E, Q, P and R, preferably is S, C or T; wherein AA⁷ is selected from the group consisting of S, T, C, E, Q, P and R, preferably is S or C. In one particular example, PEP9 is selected from the group consisting of KIPKAXXVPTEL, SIPKAXXVPTEL, HVTKPTXAPTKL, YVPKPXXAPTKL, TVPKPXXAPTQL, STPPTXXVPTRL, ASAAPXXVPQAL, ASASPXXVSQDL and ASASPXXVPQDL.

[0474] In certain embodiments useful for inducing the conversion of a neoplastic cell into a cell (any cell) of a chondrocytic cell lineage, PEP12 is a peptide of general formula PEP1-AA¹⁷-PEP11; wherein AA¹⁷ is selected from the group consisting of G, A, V, L, I, P, F, M, W, T and S (in particular is selected from the group consisting of M, I, L, V and T); wherein PEP1 is selected from the group consisting of SAIS, NAIS, SPIS, EPLP and EPLT.

[0475] In certain embodiments useful for inducing the conversion of a neoplastic cell into a cell (any cell) of a chondrocytic cell lineage, PEP11 is a peptide with 3 amino acids of general formula AA¹⁸-AA¹⁹-AA²⁰; wherein AA¹⁸ is selected from the group consisting of L, V, Q, A and R, in particular is L or V; wherein AA¹⁹ is selected from the group consisting of F, W, H and Y, in particular is Y or F; wherein AA²⁰ is selected from the group consisting of L, F, Y and I. In one particular example, PEP11 is selected from the group consisting of LYL, LYF, LFI, VYY and LYY.

[0476] In certain embodiments useful for inducing the conversion of a neoplastic cell into a cell (any cell) of a chondrocytic cell lineage, PEP1 is selected from the group consisting of SAIS, NAIS, SPIS, EPLP and EPLT; PEP11 is selected from the group consisting of LYL, LYF, LFI, VYY and LYY; and the pair PEP1:PEP11 is selected from the group consisting of SAIS:LYL, NAIS:LYF, EPLP:VYY and EPLT:LYY.

[0477] The definitions of “PEP” pairs and triplets e.g. PEP3:PEP1, PEP5:PEP12, or PEP7:PEP5:PEP1, most particularly useful for inducing the conversion of a neoplastic cell into a cell (any cell) of a chondrocytic cell lineage, are as already defined herein to the extent that PEP1, PEP3, PEP5, PEP7, PEP9, PEP11 and PEP12 are particularly useful for these applications as defined in the present cartilage section.

[0478] In certain embodiments useful for inducing the conversion of a neoplastic cell into a cell (any cell) of a chondrocytic cell lineage, said GFR-binding compound is a synthetic molecule as defined herein in the definition section.

[0479] In certain embodiments useful for inducing the conversion of a neoplastic cell into a cell (any cell) of a chondrocytic cell lineage, said GFR-binding compound is a synthetic peptide, or a variant or analog thereof, or a peptidomimetic.

[0480] Vascular Cell Lineage

[0481] Certain embodiments of the invention are particularly useful for inducing the conversion of a neoplastic cell into a cell (any cell) of a vascular cell lineage.

[0482] In other embodiments useful for inducing the conversion of a neoplastic cell into a cell (any cell) of a vascular cell lineage, PEP1 is selected from the group consisting of SNIT, RPVQ and RSVK.

[0483] In other embodiments useful for inducing the conversion of a neoplastic cell into a cell (any cell) of a vascular cell lineage, PEP3 is selected from the group consisting of VPT, SRV and TQV.

[0484] In other embodiments useful for inducing the conversion of a neoplastic cell into a cell (any cell) of a vascular cell lineage, PEP5 is a peptide of general formula PEP3-AA¹¹-AA¹²; wherein PEP3 is selected from the group consisting of VPT, SRV and TQV; wherein AA¹¹ is selected from the group consisting of E, K, Q, R, A, D, G and H, in particular is E, G, H and Q; wherein AA¹² is selected from the group consisting of L, M, T, E, Q and H, in particular is selected from the group consisting of E, Q, H and L. In one particular example, PEP5 is selected from the group consisting of VPTGQ, VPTEE, SRVHH and TQVQL.

[0485] In other embodiments useful for inducing the conversion of a neoplastic cell into a cell (any cell) of a vascular cell lineage, PEP7 is an amino acid or a peptide with between two and seven amino acids of general formula AA¹-AA²-AA³-AA⁴-AA⁵-AA⁶-AA⁷; wherein AA¹, AA², AA³, AA⁴, and AA⁵ are independently absent or AA^{I} as defined herein; wherein AA⁶ is absent or selected from the group consisting of S, T, C, E, Q, P and R, preferably is selected from the group consisting of E, Q and R; wherein AA⁷ is absent or is selected from the group consisting of S, T, C, E, Q, P and R, preferably is selected from the group consisting of S, C and P; and wherein at least one of AA¹, AA², AA³, AA⁴, AA⁵, AA⁶ or AA⁷ is not absent. In one particular example, PEP7 is selected from the group consisting of NDEGLEX, SSVKXQP and RNVQXRP.

[0486] In other embodiments useful for inducing the conversion of a neoplastic cell into a cell (any cell) of a vascular cell lineage, PEP9 is a peptide of general formula AA¹-AA²-AA³-AA⁴-AA⁵-AA⁶-AA⁷-PEP5; wherein PEP5 is a peptide of formula PEP3-AA¹¹-AA¹²; wherein PEP3 is selected from the group consisting of VPT, SRV and TQV; wherein AA¹¹ is selected from the group consisting of E, K, Q, R, A, D, G and H, in particular is E, G, H and Q; wherein AA¹² is selected from the group consisting of L, M, T, E, Q and H, in particular is selected from the group consisting of E, Q, H and L; wherein AA¹, AA², AA³, AA⁴, and AA⁵ are independently absent or AA^{I} as defined herein; wherein AA⁶ is absent or selected from the group consisting of S, T, C, E, Q, P and R, preferably is selected from the group consisting of E, Q and R; wherein AA⁷ is selected from the group consisting of S, T, C, E, Q, P and R, preferably is selected from the group consisting of S, C and P. In one particular example, PEP9 is selected from the group consisting of NDEGLEXVPTEE, NDEGLEXVPTGQ, SSVKXQPSRVHH and RNVQXRPTQVQL.

[0487] In other embodiments useful for inducing the conversion of a neoplastic cell into a cell (any cell) of a vascular cell lineage, PEP12 is a peptide of general formula PEP1-AA¹⁷-PEP11; wherein AA¹⁷ is selected from the group consisting of G, A, V, L, I, P, F, M, W, T and S (in particular is selected from the group consisting of M, I, L, V and T); wherein PEP1 is selected from the group consisting of SNIT, RPVQ and RSVK.

[0488] In other embodiments useful for inducing the conversion of a neoplastic cell into a cell (any cell) of a vascular cell lineage, PEP11 is a peptide with 3 amino acids of general formula AA¹⁸-AA¹⁹-AA²⁰; wherein AA¹⁸ is selected from the group consisting of L, V, Q, A and R, in particular is selected from the group consisting of Q, A and R; wherein AA¹⁹ is selected from the group consisting of F, W, H, Y, I and K, in particular is I or K; wherein AA²⁰ is selected from the group consisting of L, F, Y, K, I, V and M, in particular is selected from the group consisting of M, V and I. In one particular example, PEP11 is selected from the group consisting of QIM, AKV and RKI.

[0489] In other embodiments useful for inducing the conversion of a neoplastic cell into a cell (any cell) of a vascular cell lineage, PEP1 is selected from the group consisting of SNIT, RPVQ and RSVK; PEP11 is selected from the group consisting of QIM, AKV and RKI; and the pair PEP1:PEP11 is selected from the group consisting of SNIT:QIM, RSVK:KEVQV and RPVQ:KKATV.

[0490] The definitions of “PEP” pairs and triplets e.g. PEP3:PEP1, PEP5:PEP12, or PEP7:PEP5:PEP1, most particularly useful for inducing the conversion of a neoplastic cell into a cell (any cell) of a vascular cell lineage, are as already defined herein to the extent that PEP1, PEP3, PEP5, PEP7, PEP9, PEP11 and PEP12 are particularly useful for these applications as defined in the present vascular tissue section.

[0491] In other embodiments useful for inducing the conversion of a neoplastic cell into a cell (any cell) of a vascular cell lineage, said GFR-binding compound is a synthetic molecule as defined herein in the definition section.

[0492] In other embodiments useful for inducing the conversion of a neoplastic cell into a cell (any cell) of a vascular cell lineage, said GFR-binding compound is a synthetic peptide, or a variant or analog thereof, or a peptidomimetic.

[0493] Neuron Lineage

[0494] Certain embodiments of the invention are particularly useful for inducing the conversion of a neoplastic cell into a cell (any cell) of a neuron lineage.

[0495] In certain embodiments useful for inducing the conversion of a neoplastic cell into a cell (any cell) of a neuron lineage, PEP1 is selected from the group consisting of NAIS, SPIS and EPIS.

[0496] In certain embodiments useful for inducing the conversion of a neoplastic cell into a cell (any cell) of a neuron lineage, PEP3 is selected from the group consisting of VPT, APT, VPA, VPQ and VSQ.

[0497] In certain embodiments useful for inducing the conversion of a neoplastic cell into a cell (any cell) of a neuron lineage, PEP5 is a peptide of general formula PEP3-AA¹¹-AA¹²; wherein PEP3 is selected from the group consisting of VPT, APT, VPA, VPQ and VSQ; wherein AA¹¹ is selected from the group consisting of E, K, Q, R, A, D, G and H, in particular E, K, Q, R, A and D; wherein AA¹² is selected from the group consisting of L, M, T, E, Q and H, in particular L. In one particular example, PEP5 is selected from the group consisting of VPTEL, APTKL, APTQL, VPTKL, VPARL, VPQAL, VSQDL and VPQDL.

[0498] In certain embodiments useful for inducing the conversion of a neoplastic cell into a cell (any cell) of a neuron lineage, PEP7 is an amino acid or a peptide with between two and seven amino acids of general formula AA¹-AA²-AA³-AA⁴-AA⁵-AA⁶-AA⁷; wherein AA¹, AA², AA³, AA⁴, and AA⁵ are independently absent or AA^{I} as defined herein; wherein AA⁶ is absent or selected from the group consisting of S, T, C, E, Q, P and R, preferably S or C; wherein AA⁷ is absent or is selected from the group consisting of S, T, C, E, Q, P and R, preferably is S or C; and wherein at least one of AA¹, AA², AA³, AA⁴, AA⁵, AA⁶ or AA⁷ is not absent. In one particular example, PEP7 is selected from the group consisting of KIPKAXX, SIPKAXX, HVTKPTX, YVPKPXX, TVPKPXX, AVPKAXX, KVGKAXX, ASAAPXX, ASASPXX and RNVQXRP.

[0499] In certain embodiments useful for inducing the conversion of a neoplastic cell into a cell (any cell) of a neuron lineage, PEP9 is a peptide of general formula AA¹-AA²-AA³-AA⁴-AA⁵-AA⁶-AA⁷-PEP5; wherein PEP5 is a peptide of formula PEP3-AA¹¹-AA¹²; wherein PEP3 is selected from the group consisting of VPT, APT, VPA, VPQ and VSQ; wherein AA¹⁷ is selected from the group consisting of E, K, Q, R, A, D, G and H, in particular E, K, Q, R, A and D; wherein AA¹² is selected from the group consisting of L, M, T, E, Q and H, in particular L; wherein AA¹, AA², AA³, AA⁴, and AA⁵ are independently absent or AA^{I} as defined herein; wherein AA⁶ is absent or selected from the group consisting of S, T, C, E, Q, P and R, preferably S or C; wherein AA⁷ is selected from the group consisting of S, T, C, E, Q, P and R, preferably is S or C. In one particular example, PEP9 is selected from the group consisting of KIPKAXXVPTEL, SIPKAXXVPTEL, HVTKPTXAPTKL, YVPKPXXAPTKL, TVPKPXXAPTQL, AVPKAXXAPTKL, KVGKAXXVPTKL, ASAAPXXVPQAL, ASASPXXVSQDL, ASASPXXVPQDL and RNVQXRPTQVQL.

[0500] In certain embodiments useful for inducing the conversion of a neoplastic cell into a cell (any cell) of a neuron lineage, PEP12 is a peptide of general formula PEP1-AA¹⁷-PEP11; wherein AA¹⁷ is selected from the group consisting of G, A, V, L, I, P, F, M, W, T and S (in particular is selected from the group consisting of M, I, L, V and T); wherein PEP1 is selected from the group consisting of NAIS, SPIS and EPIS.

[0501] In certain embodiments useful for inducing the conversion of a neoplastic cell into a cell (any cell) of a neuron lineage, PEP11 is a peptide with 3 amino acids of general formula AA¹⁸-AA¹⁹-AA²⁰; wherein AA¹⁸ is selected from the group consisting of L, V, Q, A and R, in particular is L; wherein AA¹⁹ is selected from the group consisting of F, W, H and Y (in particular is an aromatic, polar amino acid such as Y); wherein AA²⁰ is selected from the group consisting of L, F, Y, K, I, V and M, in particular is selected from the group consisting of L, F, I, and K. In one particular example, PEP11 is selected from the group consisting of LYL, LYF, LYI and LYK.

[0502] In certain embodiments useful for inducing the conversion of a neoplastic cell into a cell (any cell) of a neuron lineage, PEP1 is selected from the group consisting of NAIS, SPIS and EPIS; PEP11 is selected from the group consisting of LYF, LYK, LYL and LYI; and the pair PEP1:PEP11 is selected from the group consisting of NAIS:LYF, SPIS:LYK, EPIS:LYL and SPIS:LYI.

[0503] The definitions of “PEP” pairs and triplets e.g. PEP3:PEP1, PEP5:PEP12, or PEP7:PEP5:PEP1, most particularly useful for inducing the conversion of a neoplastic cell into a cell (any cell) of a neuron lineage, are as already defined herein to the extent that PEP1, PEP3, PEP5, PEP7, PEP9, PEP11 and PEP12 are particularly useful for these applications as defined in the present section.

[0504] In certain embodiments useful for inducing the conversion of a neoplastic cell into a cell (any cell) of a neuron lineage, said GFR-binding compound is a synthetic molecule as defined herein in the definition section.

[0505] In certain embodiments useful for inducing the conversion of a neoplastic cell into a cell (any cell) of a neuron lineage, said GFR-binding compound is a synthetic peptide, or a variant or analog thereof, or a peptidomimetic.

[0506] Eye Retina Cell Lineage

[0507] Certain embodiments of the invention are particularly useful for inducing the conversion of a neoplastic cell into a cell (any cell) of an eye retina cell lineage.

[0508] In certain embodiments useful for inducing the conversion of a neoplastic cell into a cell (any cell) of an eye retina cell lineage, PEP1 is SPIN.

[0509] In certain embodiments useful for inducing the conversion of a neoplastic cell into a cell (any cell) of an eye retina cell lineage, PEP3 is selected from the group consisting of VPT, APT, TPT, VPA and APV.

[0510] In certain embodiments useful for inducing the conversion of a neoplastic cell into a cell (any cell) of an eye retina cell lineage, PEP5 is a peptide of general formula PEP3-AA¹¹-AA¹²; wherein PEP3 is selected from the group consisting of VPT, APT, TPT, VPA and APV; wherein AA¹¹ is selected from the group consisting of E, K, Q, R, A, D, G and H, in particular is E, K, Q and R; wherein AA¹² is selected from the group consisting of L, M, T, E, Q and H, in particular is L, M or T. In one particular example, PEP5 is selected from the group consisting of VPTEL, APTKL, APTQL, VPTKL, TPTKM, VPARL, VPTRL and APVKT.

[0511] In certain embodiments useful for inducing the conversion of a neoplastic cell into a cell (any cell) of an eye retina cell lineage, PEP7 is an amino acid or a peptide with between two and seven amino acids of general formula AA¹-AA²-AA³-AA⁴-AA⁵-AA⁶-AA⁷; wherein AA¹, AA², AA³, AA⁴, and AA⁵ are independently absent or AA^{I} as defined herein; wherein AA⁶ is absent or selected from the group consisting of S, T, C, E, Q, P and R, preferably is S or C; wherein AA⁷ is absent or is selected from the group consisting of S, T, C, E, Q, P and R, preferably is S or C; and wherein at least one of AA¹, AA², AA³, AA⁴, AA⁵, AA⁶ or AA⁷ is not absent. In one particular example, PEP7 is selected from the group consisting of KIPKAXX, SIPKAXX, HVTKPTX, YVPKPXX, TVPKPXX, AVPKAXX, KVGKAXX, KASKAXX, GSAGPXX, AAPAXXS, STPPTXX, HVPKPXX and RVPSTXX.

[0512] In certain embodiments useful for inducing the conversion of a neoplastic cell into a cell (any cell) of an eye retina cell lineage, PEP9 is a peptide of general formula AA¹-AA²-AA³-AA⁴-AA⁵-AA⁶-AA⁷-PEP5; wherein PEP5 is a peptide of formula PEP3-AA¹¹-AA¹²; wherein PEP3 is selected from the group consisting of VPT, APT, TPT, VPA and APV; wherein AA¹¹ is selected from the group consisting of E, K, Q, R, A, D, G and H, in particular is E, K, Q and R; wherein AA¹² is selected from the group consisting of L, M, T, E, Q and H, in particular is L, M or T; wherein AA¹, AA², AA³, AA⁴, and AA⁵ are independently absent or AA^{I} as defined herein; wherein AA⁶ is absent or selected from the group consisting of S, T, C, E, Q, P and R, preferably is S or C; wherein AA⁷ is selected from the group consisting of S, T, C, E, Q, P and R, preferably is S or C. In one particular example, PEP9 is selected from the group consisting of KIPKAXXVPTEL, SIPKAXXVPTEL, HVTKPTXAPTKL, YVPKPXXAPTKL, TVPKPXXAPTQL, AVPKAXXAPTKL, KVGKAXXVPTKL, KASKAXXVPTKL, GSAGPXXTPTKL, AAPASXXVPARL, STPPTXXVPTRL, HVPKPXXAPTKL and RVPSTXXAPVKT.

[0513] In certain embodiments useful for inducing the conversion of a neoplastic cell into a cell (any cell) of an eye retina cell lineage, PEP12 is a peptide of general formula PEP1-AA¹⁷-PEP11; wherein AA¹⁷ is selected from the group consisting of G, A, V, L, I, P, F, M, W, T and S (in particular is selected from the group consisting of M, I, L, V and T); wherein PEP1 is SPIN.

[0514] In certain embodiments useful for inducing the conversion of a neoplastic cell into a cell (any cell) of an eye retina cell lineage, PEP11 is a peptide with 3 amino acids of general formula AA¹⁸-AA¹⁹-AA²⁰; wherein AA¹⁸ is selected from the group consisting of L, V, Q, A and R, in particular is L; wherein AA¹⁹ is selected from the group consisting of F, W, H and Y, in particular is Y or F; wherein AA²⁰ is selected from the group consisting of L, F, Y, K, I, V and M, in particular is selected from the group consisting of L, F, Y, K, I and V. In one particular example, PEP11 is LYF.

[0515] In certain embodiments useful for inducing the conversion of a neoplastic cell into a cell (any cell) of an eye retina cell lineage, PEP1 is SPIN and PEP11 is LYF.

[0516] The definitions of “PEP” pairs and triplets e.g. PEP3:PEP1, PEP5:PEP12, or PEP7:PEP5:PEP1, most particularly useful for inducing the conversion of a neoplastic cell into a cell (any cell) of an eye retina cell lineage, are as already defined herein to the extent that PEP1, PEP3, PEP5, PEP7, PEP9, PEP11 and PEP12 are particularly useful for these applications as defined in the present eye retina section.

[0517] In certain embodiments useful for inducing the conversion of a neoplastic cell into a cell (any cell) of an eye retina cell lineage, said GFR-binding compound is a synthetic molecule as defined herein in the definition section.

[0518] In certain embodiments useful for inducing the conversion of a neoplastic cell into a cell (any cell) of an eye retina cell lineage, said GFR-binding compound is a synthetic peptide, or a variant or analog thereof, or a peptidomimetic.

[0519] Renal Cell Lineage

[0520] Certain embodiments of the invention are particularly useful for inducing the conversion of a neoplastic cell into a cell (any cell) of a renal cell lineage.

[0521] In certain embodiments useful for inducing the conversion of a neoplastic cell into a cell (any cell) of a renal cell lineage, PEP1 is SPIN.

[0522] In certain embodiments useful for inducing the conversion of a neoplastic cell into a cell (any cell) of a renal cell lineage, PEP3 is selected from the group consisting of VPT, APT, TPT, VPA and APV.

[0523] In certain embodiments useful for inducing the conversion of a neoplastic cell into a cell (any cell) of a renal cell lineage, PEP5 is a peptide of general formula PEP3-AA¹¹-AA¹²; wherein PEP3 is selected from the group consisting of VPT, APT, TPT, VPA and APV; wherein AA¹¹ is selected from the group consisting of E, K, Q, R, A, D, G and H, in particular is E, K, Q and R; wherein AA¹² is selected from the group consisting of L, M, T, E, Q and H, in particular is L, M or T. In one particular example, PEP5 is selected from the group consisting of VPTEL, APTKL, APTQL, VPTKL, TPTKM, VPARL, VPTRL and APVKT.

[0524] In certain embodiments useful for inducing the conversion of a neoplastic cell into a cell (any cell) of a renal cell lineage, PEP7 is an amino acid or a peptide with between two and seven amino acids of general formula AA¹-AA²-AA³-AA⁴-AA⁵-AA⁶-AA⁷; wherein AA¹, AA², AA³, AA⁴, and AA⁵ are independently absent or AA^{I} as defined herein; wherein AA⁶ is absent or selected from the group consisting of S, T, C, E, Q, P and R, preferably is S or C; wherein AA⁷ is absent or is selected from the group consisting of S, T, C, E, Q, P and R, preferably is S or C; and wherein at least one of AA¹, AA², AA³, AA⁴, AA⁵, AA⁶ or AA⁷ is not absent. In one particular example, PEP7 is selected from the group consisting of KIPKAXX, SIPKAXX, HVTKPTX, YVPKPXX, TVPKPXX, AVPKAXX, KVGKAXX, KASKAXX, GSAGPXX, AAPAXXS, STPPTXX, HVPKPXX and RVPSTXX.

[0525] In certain embodiments useful for inducing the conversion of a neoplastic cell into a cell (any cell) of a renal cell lineage, PEP9 is a peptide of general formula AA¹-AA²-AA³-AA⁴-AA⁵-AA⁶-AA⁷-PEP5; wherein PEP5 is a peptide of formula PEP3-AA¹¹-AA¹²; wherein PEP3 is selected from the group consisting of VPT, APT, TPT, VPA and APV; wherein AA¹¹ is selected from the group consisting of E, K, Q, R, A, D, G and H, in particular is E, K, Q and R; wherein AA¹² is selected from the group consisting of L, M, T, E, Q and H, in particular is L, M or T; wherein AA¹, AA², AA³, AA⁴, and AA⁵ are independently absent or AA^{I} as defined herein; wherein AA⁶ is absent or selected from the group consisting of S, T, C, E, Q, P and R, preferably is S or C; wherein AA^{I} is selected from the group consisting of S, T, C, E, Q, P and R, preferably is S or C. In one particular example, PEP9 is selected from the group consisting of KIPKAXXVPTEL, SIPKAXXVPTEL, HVTKPTXAPTKL, YVPKPXXAPTKL, TVPKPXXAPTQL, AVPKAXXAPTKL, KVGKAXXVPTKL, KASKAXXVPTKL, GSAGPXXTPTKL, AAPASXXVPARL, STPPTXXVPTRL, HVPKPXXAPTKL and RVPSTXXAPVKT.

[0526] In certain embodiments useful for inducing the conversion of a neoplastic cell into a cell (any cell) of a renal cell lineage, PEP12 is a peptide of general formula PEP1-AA¹⁷-PEP11; wherein AA¹⁷ is selected from the group consisting of G, A, V, L, I, P, F, M, W, T and S (in particular is selected from the group consisting of M, I, L, V and T); wherein PEP1 is SPIN.

[0527] In certain embodiments useful for inducing the conversion of a neoplastic cell into a cell (any cell) of a renal cell lineage, PEP11 is a peptide with 3 amino acids of general formula AA¹⁸-AA¹⁹-AA²⁰; wherein AA¹⁸ is selected from the group consisting of L, V, Q, A and R, in particular is L; wherein AA¹⁹ is selected from the group consisting of F, W, H and Y, in particular is Y or F; wherein AA²⁰ is selected from the group consisting of L, F, Y, K, I, V and M, in particular is selected from the group consisting of L, F, Y, K, I and V. In one particular example, PEP11 is LYF.

[0528] In certain embodiments useful for inducing the conversion of a neoplastic cell into a cell (any cell) of a renal cell lineage, PEP1 is SPIN and PEP11 is LYF.

[0529] The definitions of “PEP” pairs and triplets e.g. PEP3:PEP1, PEP5:PEP12, or PEP7:PEP5:PEP1, most particularly useful for inducing the conversion of a neoplastic cell into a cell (any cell) of a renal cell lineage, are as already defined herein to the extent that PEP1, PEP3, PEP5, PEP7, PEP9, PEP11 and PEP12 are particularly useful for these applications as defined in the present renal tissue section.

[0530] In certain embodiments useful for inducing the conversion of a neoplastic cell into a cell (any cell) of a renal cell lineage, said GFR-binding compound is a synthetic molecule as defined herein in the definition section.

[0531] In certain embodiments useful for inducing the conversion of a neoplastic cell into a cell (any cell) of a renal cell lineage, said GFR-binding compound is a synthetic peptide, or a variant or analog thereof, or a peptidomimetic.

[0532] Ligament and Tendon Cell Lineage

[0533] Certain embodiments of the invention are particularly useful for inducing the conversion of a neoplastic cell into a cell (any cell) of the ligament and tendon cell lineage.

[0534] In certain embodiments useful for inducing the conversion of a neoplastic cell into a cell (any cell) of the ligament and tendon cell lineage, PEP1 is selected from the group consisting of NAIS, SPIS, EPLP and EPLT.

[0535] In certain embodiments useful for inducing the conversion of a neoplastic cell into a cell (any cell) of the ligament and tendon cell lineage, PEP3 is selected from the group consisting of VPT, APT, VPQ and VSQ.

[0536] In certain embodiments useful for inducing the conversion of a neoplastic cell into a cell (any cell) of the ligament and tendon cell lineage, PEP5 is a peptide of general formula PEP3-AA¹¹-AA¹²; wherein PEP3 is selected from the group consisting of VPT, APT, VPQ and VSQ; wherein AA¹¹ is selected from the group consisting of E, K, Q, R, A, D, G and H, in particular is E, K, Q, R, A and D; wherein AA¹² is selected from the group consisting of L, M, T, E, Q and H, in particular is L. In one particular example, PEP5 is selected from the group consisting of VPTEL, APTKL, APTQL, VPTRL, VPQAL, VSQDL and VPQDL.

[0537] In certain embodiments useful for inducing the conversion of a neoplastic cell into a cell (any cell) of the ligament and tendon cell lineage, PEP7 is an amino acid or a peptide with between two and seven amino acids of general formula AA¹-AA²-AA³-AA⁴-AA⁵-AA⁶-AA⁷; wherein AA¹, AA², AA³, AA⁴, and AA⁵ are independently absent or AA^{I} as defined herein; wherein AA⁶ is absent or selected from the group consisting of S, T, C, E, Q, P and R, preferably is selected from the group consisting of T, S and C; wherein AA⁷ is absent or is selected from the group consisting of S, T, C, E, Q, P and R, preferably S or C; and wherein at least one of AA¹, AA², AA³, AA⁴, AA⁵, AA⁶ or AA⁷ is not absent. In one particular example, PEP7 is selected from the group consisting of KIPKAXX, SIPKAXX, HVTKPTX, YVPKPXX, TVPKPXX, STPPTXX, ASAAPXX and ASASPXX.

[0538] In certain embodiments useful for inducing the conversion of a neoplastic cell into a cell (any cell) of the ligament and tendon cell lineage, PEP9 is a peptide of general formula AA¹-AA²-AA³-AA⁴-AA⁵-AA⁶-AA⁷-PEP5; wherein PEP5 is a peptide of formula PEP3-AA¹¹-AA¹²; wherein PEP3 is selected from the group consisting of VPT, APT, VPQ and VSQ; wherein AA¹¹ is selected from the group consisting of E, K, Q, R, A, D, G and H, in particular is E, K, Q, R, A and D; wherein AA¹² is selected from the group consisting of L, M, T, E, Q and H, in particular is L; wherein AA¹, AA², AA³, AA⁴, and AA⁵ are independently absent or AA^{I} as defined herein; wherein AA⁶ is absent or selected from the group consisting of S, T, C, E, Q, P and R, preferably is selected from the group consisting of T, S and C; wherein AA⁷ is selected from the group consisting of S, T, C, E, Q, P and R, preferably S or C. In one particular example, PEP9 is selected from the group consisting of KIPKAXXVPTEL, SIPKAXXVPTEL, HVTKPTXAPTKL, YVPKPXXAPTKL, TVPKPXXAPTQL, STPPTXXVPTRL, ASAAPXXVPQAL, ASASPXXVSQDL and ASASPXXVPQDL.

[0539] In certain embodiments useful for inducing the conversion of a neoplastic cell into a cell (any cell) of the ligament and tendon cell lineage, PEP12 is a peptide of general formula PEP1-AA¹⁷-PEP11; wherein AA¹⁷ is selected from the group consisting of G, A, V, L, I, P, F, M, W, T and S (in particular is selected from the group consisting of M, I, L, V and T); wherein PEP1 is selected from the group consisting of NAIS, SPIS, EPLP and EPLT.

[0540] In certain embodiments useful for inducing the conversion of a neoplastic cell into a cell (any cell) of the ligament and tendon cell lineage, PEP11 is a peptide with 3 amino acids of general formula AA¹⁸-AA¹⁹-AA²⁰; wherein AA¹⁸ is selected from the group consisting of L, V, Q, A and R, in particular is L or V; wherein AA¹⁹ is selected from the group consisting of F, W, H and Y, in particular is Y or F; wherein AA²⁰ is selected from the group consisting of L, F, Y, K, I, V and M, in particular is selected from the group consisting of F, I and Y. In one particular example, PEP11 is selected from the group consisting of LYF, LFI, VYY and LYY.

[0541] In certain embodiments useful for inducing the conversion of a neoplastic cell into a cell (any cell) of the ligament and tendon cell lineage, PEP1 is selected from the group consisting of NAIS, SPIS, EPLP and EPLT; PEP11 is selected from the group consisting of LYF, LFI, VYY and LYY; and the pair PEP1:PEP11 is selected from the group consisting of NAIS:LYF, EPLP:VYY and EPLT:LYY.

[0542] The definitions of “PEP” pairs and triplets e.g. PEP3:PEP1, PEP5:PEP12, or PEP7:PEP5:PEP1, most particularly useful for inducing the conversion of a neoplastic cell into a cell (any cell) of the ligament and tendon cell lineage, are as already defined herein to the extent that PEP1, PEP3, PEP5, PEP7, PEP9, PEP11 and PEP12 are particularly useful for these applications as defined in the present L/T section.

[0543] In certain embodiments useful for inducing the conversion of a neoplastic cell into a cell (any cell) of the ligament and tendon cell lineage, said GFR-binding compound is a synthetic molecule as defined herein in the definition section.

[0544] In certain embodiments useful for inducing the conversion of a neoplastic cell into a cell (any cell) of the ligament and tendon cell lineage, said GFR-binding compound is a synthetic peptide, or a variant or analog thereof, or a peptidomimetic.

[0545] In other embodiments also useful for inducing the conversion of a neoplastic cell into a cell (any cell) of the ligament and tendon cell lineage, PEP1 is SPIS.

[0546] In other embodiments also useful for inducing the conversion of a neoplastic cell into a cell (any cell) of the ligament and tendon cell lineage, PEP3 is selected from the group consisting of VPT, APT, TPT, VPA and APV.

[0547] In other embodiments also useful for inducing the conversion of a neoplastic cell into a cell (any cell) of the ligament and tendon cell lineage, PEP5 is a peptide of general formula PEP3-AA¹¹-AA¹²; wherein PEP3 is selected from the group consisting of VPT, APT, TPT, VPA and APV; wherein AA¹¹ is selected from the group consisting of E, K, Q, R, A, D, G and H, in particular is selected from the group consisting of E, K, Q and R; wherein AA¹² is selected from the group consisting of L, M, T, E, Q and H, in particular is selected from the group consisting of L, M and T. In one particular example, PEP5 is selected from the group consisting of VPTEL, APTKL, APTQL, VPTKL, TPTKM, VPARL, VPTRL and APVKT.

[0548] In other embodiments also useful for inducing the conversion of a neoplastic cell into a cell (any cell) of the ligament and tendon cell lineage, PEP7 is an amino acid or a peptide with between two and seven amino acids of general formula AA¹-AA²-AA³-AA⁴-AA⁵-AA⁶-AA⁷; wherein AA¹, AA², AA³, AA⁴, and AA⁵ are independently absent or AA^{I} as defined herein; wherein AA⁶ is absent or selected from the group consisting of S, T, C, E, Q, P and R, preferably is S or C; wherein AA⁷ is absent or is selected from the group consisting of S, T, C, E, Q, P and R, preferably is S or C; and wherein at least one of AA¹, AA², AA³, AA⁴, AA⁵, AA⁶ or AA⁷ is not absent. In one particular example, PEP7 is selected from the group consisting of KIPKAXX, SIPKAXX, HVTKPTX, YVPKPXX, TVPKPXX, AVPKAXX, KVGKAXX, KASKAXX, GSAGPXX, AAPAXXS, STPPTXX, HVPKPXX and RVPSTXX.

[0549] In other embodiments also useful for inducing the conversion of a neoplastic cell into a cell (any cell) of the ligament and tendon cell lineage, PEP9 is a peptide of general formula AA¹-AA²-AA³-AA⁴-AA⁵-AA⁶-AA⁷-PEP5; wherein PEP5 is a peptide of formula PEP3-AA¹¹-AA¹²; wherein PEP3 is selected from the group consisting of VPT, APT, TPT, VPA and APV; wherein AA¹¹ is selected from the group consisting of E, K, Q, R, A, D, G and H, in particular is E, K, Q and R; wherein AA¹² is selected from the group consisting of L, M, T, E, Q and H, in particular is L, M or T; wherein AA¹, AA², AA³, AA⁴, and AA⁵ are independently absent or AA^{I} as defined herein; wherein AA⁶ is absent or selected from the group consisting of S, T, C, E, Q, P and R, preferably is S or C; wherein AA⁷ is selected from the group consisting of S, T, C, E, Q, P and R, preferably is S or C. In one particular example, PEP9 is selected from the group consisting of KIPKAXXVPTEL, SIPKAXXVPTEL, HVTKPTXAPTKL, YVPKPXXAPTKL, TVPKPXXAPTQL, AVPKAXXAPTKL, KVGKAXXVPTKL, KASKAXXVPTKL, GSAGPXXTPTKL, AAPASXXVPARL, STPPTXXVPTRL, HVPKPXXAPTKL and RVPSTXXAPVKT.

[0550] In other embodiments also useful for inducing the conversion of a neoplastic cell into a cell (any cell) of the ligament and tendon cell lineage, PEP12 is a peptide of general formula PEP1-AA¹⁷-PEP11; wherein AA¹⁷ is selected from the group consisting of G, A, V, L, I, P, F, M, W, T and S (in particular is selected from the group consisting of M, I, L, V and T); wherein PEP1 is SPIS.

[0551] In other embodiments also useful for inducing the conversion of a neoplastic cell into a cell (any cell) of the ligament and tendon cell lineage, PEP11 is a peptide with 3 amino acids of general formula AA¹⁸-AA¹⁹-AA²⁰; wherein AA¹⁸ is selected from the group consisting of L, V, Q, A and R, in particular is L; wherein AA¹⁹ is selected from the group consisting of F, W, H and Y, in particular is a polar aromatic amino acid such as Y; wherein AA²⁰ is selected from the group consisting of L, F, Y, K, I, V and M, in particular is I. In one particular example, PEP11 is LYI.

[0552] In other embodiments also useful for inducing the conversion of a neoplastic cell into a cell (any cell) of the ligament and tendon cell lineage, PEP1 is SPIS and PEP11 is LYI.

[0553] The definitions of “PEP” pairs and triplets e.g. PEP3:PEP1, PEP5:PEP12, or PEP7:PEP5:PEP1, also most particularly useful for inducing the conversion of a neoplastic cell into a cell (any cell) of the ligament and tendon cell lineage, are as already defined herein to the extent that PEP1, PEP3, PEP5, PEP7, PEP9, PEP11 and PEP12 are particularly useful for these applications as defined in the present L/T section.

[0554] In other embodiments also useful for inducing the conversion of a neoplastic cell into a cell (any cell) of the ligament and tendon cell lineage, said GFR-binding compound is a synthetic molecule as defined herein in the definition section.

[0555] In other embodiments also useful for inducing the conversion of a neoplastic cell into a cell (any cell) of the ligament and tendon cell lineage, said GFR-binding compound is a synthetic peptide, or a variant or analog thereof, or a peptidomimetic.

[0556] Fibroblast Lineage

[0557] Certain embodiments of the invention are particularly useful for inducing the conversion of a neoplastic cell into a cell (any cell) of a fibroblast lineage.

[0558] Certain embodiments of the invention are particularly useful for inducing the conversion of a neoplastic cell into a cell (any cell) of a fibroblast lineage.

[0559] In certain embodiments useful for inducing the conversion of a neoplastic cell into a cell (any cell) of a fibroblast lineage, PEP1 is selected from the group consisting of EPLP, EPLT, SNIT, RSVK and RPVQ.

[0560] In certain embodiments useful for inducing the conversion of a neoplastic cell into a cell (any cell) of a fibroblast lineage, PEP3 is selected from the group consisting of VPT, APT, VPQ, VSQ, SRV and TQV.

[0561] In certain embodiments useful for inducing the conversion of a neoplastic cell into a cell (any cell) of a fibroblast lineage, PEP5 is a peptide of general formula PEP3-AA¹¹-AA¹²; wherein PEP3 is selected from the group consisting of VPT, APT, VPQ, VSQ, SRV and TQV; wherein AA¹¹ is selected from the group consisting of E, K, Q, R, A, D, G and H, in particular is selected from the group consisting of E, K, Q, A, D and H; wherein AA¹² is selected from the group consisting of L, M, T, E, Q and H, in particular is selected from the group consisting of L, E and H. In one particular example, PEP5 is selected from the group consisting of VPTEL, APTKL, APTQL, VPQAL, VSQDL, VPQDL, VPTEE, SRVHH and TQVQL.

[0562] In certain embodiments useful for inducing the conversion of a neoplastic cell into a cell (any cell) of a fibroblast lineage, PEP7 is an amino acid or a peptide with between two and seven amino acids of general formula AA¹-AA²-AA³-AA⁴-AA⁵-AA⁶-AA⁷; wherein AA¹, AA², AA³, AA⁴, and AA⁵ are independently absent or AA^{I} as defined herein; wherein AA⁶ is absent or selected from the group consisting of S, T, C, E, Q, P and R, preferably is selected from the group consisting of C, S, T, E, R and Q; wherein AA⁷ is absent or is selected from the group consisting of S, T, C, E, Q, P and R, preferably is selected from the group consisting of S, C and P; and wherein at least one of AA¹, AA², AA³, AA⁴, AA⁵, AA⁶ or AA⁷ is not absent. In one particular example, PEP7 is selected from the group consisting of KIPKAXX, SIPKAXX, HVTKPTX, YVPKPXX, TVPKPXX, ASAAPXX, ASASPXX, NDEGLEX, SSVKXQP and RNVQXRP.

[0563] In certain embodiments useful for inducing the conversion of a neoplastic cell into a cell (any cell) of a fibroblast lineage, PEP9 is a peptide of general formula AA¹-AA²-AA³-AA⁴-AA⁵-AA⁶-AA⁷-PEP5; wherein PEP5 is a peptide of formula PEP3-AA¹¹-AA¹²; wherein PEP3 is selected from the group consisting of VPT, APT, VPQ, VSQ, SRV and TQV; wherein AA¹¹ is selected from the group consisting of E, K, Q, R, A, D, G and H, in particular is selected from the group consisting of E, K, Q, A, D and H; wherein AA¹² is selected from the group consisting of L, M, T, E, Q and H, in particular is selected from the group consisting of L, E and H; wherein AA¹, AA², AA³, AA⁴, and AA⁵ are independently absent or AA^{I} as defined herein; wherein AA⁶ is absent or selected from the group consisting of S, T, C, E, Q, P and R, preferably is selected from the group consisting of C, S, T, E, R and Q; wherein AA^{I} is selected from the group consisting of S, T, C, E, Q, P and R, preferably is selected from the group consisting of S, C and P. In one particular example, PEP9 is selected from the group consisting of KIPKAXXVPTEL, SIPKAXXVPTEL, HVTKPTXAPTKL, YVPKPXXAPTKL, TVPKPXXAPTQL, ASAAPXXVPQAL, ASASPXXVSQDL, ASASPXXVPQDL, NDEGLEXVPTEE, SSVKXQPSRVHH and RNVQXRPTQVQL.

[0564] In certain embodiments useful for inducing the conversion of a neoplastic cell into a cell (any cell) of a fibroblast lineage, PEP12 is a peptide of general formula PEP1-AA¹⁷-PEP11; wherein AA¹⁷ is selected from the group consisting of G, A, V, L, I, P, F, M, W, T and S (in particular is selected from the group consisting of M, I, L, V and T); wherein PEP1 is selected from the group consisting of EPLP, EPLT, SNIT, RSVK and RPVQ.

[0565] In certain embodiments useful for inducing the conversion of a neoplastic cell into a cell (any cell) of a fibroblast lineage, PEP11 is a peptide with 3 amino acids of general formula AA¹⁸-AA¹⁹-AA²⁰; wherein AA¹⁸ is selected from the group consisting of L, V, Q, A and R; wherein AA¹⁹ is selected from the group consisting of F, W, H, Y, I and K, in particular is selected from the group consisting of Y, I and K; wherein AA²⁰ is selected from the group consisting of L, F, Y, K, I, V and M, in particular is selected from the group consisting of Y, M, V and I. In one particular example, PEP11 is selected from the group consisting of VYY, LYY, QIM, AKV and RKI.

[0566] In certain embodiments useful for inducing the conversion of a neoplastic cell into a cell (any cell) of a fibroblast lineage, PEP1 is selected from the group consisting of EPLP, EPLT, SNIT, RSVK and RPVQ; PEP11 is selected from the group consisting of VYY, LYY, QIM, AKV and RKI; and the pair PEP1:PEP11 is selected from the group consisting of EPLP:VYY, EPLT:LYY, SNIT:QIM, RSVK:KEVQV and RPVQ:KKATV.

[0567] The definitions of “PEP” pairs and triplets e.g. PEP3:PEP1, PEP5:PEP12, or PEP7:PEP5:PEP1, also most particularly useful for inducing the conversion of a neoplastic cell into a cell (any cell) of a fibroblast lineage, are as already defined herein to the extent that PEP1, PEP3, PEP5, PEP7, PEP9, PEP11 and PEP12 are particularly useful for these applications as defined in the present skin regeneration section.

[0568] In certain embodiments useful for inducing the conversion of a neoplastic cell into a cell (any cell) of a fibroblast lineage, said GFR-binding compound is a synthetic molecule as defined herein in the definition section.

[0569] In certain embodiments useful for inducing the conversion of a neoplastic cell into a cell (any cell) of a fibroblast lineage, said GFR-binding compound is a synthetic peptide, or a variant or analog thereof, or a peptidomimetic.

[0570] Reproduction System Lineage

[0571] Certain embodiments of the invention are particularly useful for inducing the conversion of a neoplastic cell into a cell (any cell) of the reproduction system lineage.

[0572] In certain embodiments useful for inducing the conversion of a neoplastic cell into a cell (any cell) of the reproduction system lineage, PEP1 is NAIS.

[0573] In certain embodiments useful for inducing the conversion of a neoplastic cell into a cell (any cell) of the reproduction system lineage, PEP3 is selected from the group consisting of VPT, APT, TPT, VPA and APV.

[0574] In certain embodiments useful for inducing the conversion of a neoplastic cell into a cell (any cell) of the reproduction system lineage, PEP5 is a peptide of general formula PEP3-AA¹¹-AA¹²; wherein PEP3 is selected from the group consisting of VPT, APT, TPT, VPA and APV; wherein AA¹⁷ is selected from the group consisting of E, K, Q, R, A, D, G and H, in particular is selected from the group consisting of E, K, Q and R; wherein AA¹² is selected from the group consisting of L, M, T, E, Q and H, in particular is selected from the group consisting of L, M and T. In one particular example, PEP5 is selected from the group consisting of VPTEL, APTKL, APTQL, VPTKL, TPTKM, VPARL, VPTRL and APVKT.

[0575] In certain embodiments useful for inducing the conversion of a neoplastic cell into a cell (any cell) of the reproduction system lineage, PEP7 is an amino acid or a peptide with between two and seven amino acids of general formula AA¹-AA²-AA³-AA⁴-AA⁵-AA⁶-AA⁷; wherein AA¹, AA², AA³, AA⁴, and AA⁵ are independently absent or AA^{I} as defined herein; wherein AA⁶ is absent or selected from the group consisting of S, T, C, E, Q, P and R, preferably is selected from the group consisting of C, S and T; wherein AA⁷ is absent or is selected from the group consisting of S, T, C, E, Q, P and R, preferably is selected from the group consisting of S and C; and wherein at least one of AA¹, AA², AA³, AA⁴, AA⁵, AA⁶ or AA⁷ is not absent. In one particular example, PEP7 is selected from the group consisting of KIPKAXX, SIPKAXX, HVTKPTX, YVPKPXX, TVPKPXX, AVPKAXX, KVGKAXX, KASKAXX, GSAGPXX, AAPASXX, STPPTXX, HVPKPXX and RVPSTXX.

[0576] In certain embodiments useful for inducing the conversion of a neoplastic cell into a cell (any cell) of the reproduction system lineage, PEP9 is a peptide of general formula AA¹-AA²-AA³-AA⁴-AA⁵-AA⁶-AA⁷-PEP5; wherein PEP5 is a peptide of formula PEP3-AA¹¹-AA¹²; wherein PEP3 is selected from the group consisting of VPT, APT, TPT, VPA and APV; wherein AA¹¹ is selected from the group consisting of E, K, Q, R, A, D, G and H, in particular is selected from the group consisting of E, K, Q and R; wherein AA¹² is selected from the group consisting of L, M, T, E, Q and H, in particular is selected from the group consisting of L, M and T; wherein AA¹, AA², AA³, AA⁴, and AA⁵ are independently absent or AA^{I} as defined herein; wherein AA⁶ is absent or selected from the group consisting of S, T, C, E, Q, P and R, preferably is selected from the group consisting of C, S and T; wherein AA^{I} is selected from the group consisting of S, T, C, E, Q, P and R, preferably is selected from the group consisting of S and C. In one particular example, PEP9 is selected from the group consisting of KIPKAXXVPTEL, SIPKAXXVPTEL, HVTKPTXAPTKL, YVPKPXXAPTKL, TVPKPXXAPTQL, AVPKAXXAPTKL, KVGKAXXVPTKL, KASKAXXVPTKL, GSAGPXXTPTKM, AAPASXXVPARL, STPPTXXVPTRL, HVPKPXXAPTKL and RVPSTXXAPVKT.

[0577] In certain embodiments useful for inducing the conversion of a neoplastic cell into a cell (any cell) of the reproduction system lineage, PEP12 is a peptide of general formula PEP1-AA¹⁷-PEP11; wherein AA¹⁷ is selected from the group consisting of G, A, V, L, I, P, F, M, W, T and S (in particular is selected from the group consisting of M, I, L, V and T); wherein PEP1 is NAIS.

[0578] In certain embodiments useful for inducing the conversion of a neoplastic cell into a cell (any cell) of the reproduction system lineage, PEP11 is a peptide with 3 amino acids of general formula AA¹⁸-AA¹⁹-AA²⁰; wherein AA¹⁸ is selected from the group consisting of L, V, Q, A and R, in particular is L; wherein AA¹⁹ is selected from the group consisting of F, W, H, Y, I and K, in particular is Y; wherein AA²⁰ is selected from the group consisting of L, F, Y, K, I, V and M, in particular is F. In one particular example, PEP11 is LYF.

[0579] In certain embodiments useful for inducing the conversion of a neoplastic cell into a cell (any cell) of the reproduction system lineage, PEP1 is NAIS and PEP11 is LYF.

[0580] The definitions of “PEP” pairs and triplets e.g. PEP3:PEP1, PEP5:PEP12, or PEP7:PEP5:PEP1, also most particularly useful for inducing the conversion of a neoplastic cell into a cell (any cell) of the reproduction system lineage, are as already defined herein to the extent that PEP1, PEP3, PEP5, PEP7, PEP9, PEP11 and PEP12 are particularly useful for these applications as defined in the present fertility and reproduction section.

[0581] In certain embodiments useful for inducing the conversion of a neoplastic cell into a cell (any cell) of the reproduction system lineage, said GFR-binding compound is a synthetic molecule as defined herein in the definition section.

[0582] In certain embodiments useful for inducing the conversion of a neoplastic cell into a cell (any cell) of the reproduction system lineage, said GFR-binding compound is a synthetic peptide, or a variant or analog thereof, or a peptidomimetic.

[0583] Lung Cell Lineage

[0584] Certain embodiments of the invention are particularly useful for inducing the conversion of a neoplastic cell into a cell (any cell) of the lung cell lineage.

[0585] In certain embodiments useful for inducing the conversion of a neoplastic cell into a cell (any cell) of the lung cell lineage, PEP1 is selected from the group consisting of NAIS, SATS, SPIS, EPIS and SPIN.

[0586] In certain embodiments useful for inducing the conversion of a neoplastic cell into a cell (any cell) of the lung cell lineage, PEP3 is selected from the group consisting of VPT, VPE, APT, TPT, VPA, APV, VPQ and VSQ.

[0587] In certain embodiments useful for inducing the conversion of a neoplastic cell into a cell (any cell) of the lung cell lineage, PEP5 is a peptide of general formula PEP3-AA¹¹-AA¹²; wherein PEP3 is selected from the group consisting of VPT, VPE, APT, TPT, VPA, APV, VPQ and VSQ; wherein AA¹¹ is selected from the group consisting of E, K, Q, R, A, D, G and H, in particular is selected from the group consisting of E, K, Q, R, A and D; wherein AA¹² is selected from the group consisting of L, M, T, E, Q and H, in particular selected from the group consisting of L, M and T. In one particular example, PEP5 is selected from the group consisting of VPTEL, VPEKM, APTKL, APTQL, VPTKL, TPTKM, VPARL, VPTRL, APVKT, VPQAL, VSQDL and VPQDL.

[0588] In certain embodiments useful for inducing the conversion of a neoplastic cell into a cell (any cell) of the lung cell lineage, PEP7 is an amino acid or a peptide with between two and seven amino acids of general formula AA¹-AA²-AA³-AA⁴-AA⁵-AA⁶-AA⁷; wherein AA¹, AA², AA³, AA⁴, and AA⁵ are independently absent or AA^{I} as defined herein; wherein AA⁶ is absent or selected from the group consisting of S, T, C, E, Q, P and R, preferably is selected from the group consisting of C, S and T; wherein AA⁷ is absent or is selected from the group consisting of S, T, C, E, Q, P and R, preferably is C or S; and wherein at least one of AA¹, AA², AA³, AA⁴, AA⁵, AA⁶ or AA⁷ is not absent. In one particular example, PEP7 is selected from the group consisting of KIPKAXX, GIPEPXX, SIPKAXX, HVTKPTX, YVPKPXX, TVPKPXX, AVPKAXX, KVGKAXX, KASKAXX, GSAGPXX, AAPASXX, STPPTXX, HVPKPXX, RVPSTXX, ASAAPXX and ASASPXX.

[0589] In certain embodiments useful for inducing the conversion of a neoplastic cell into a cell (any cell) of the lung cell lineage, PEP9 is a peptide of general formula AA¹-AA²-AA³-AA⁴-AA⁵-AA⁶-AA⁷-PEP5; wherein PEP5 is a peptide of formula PEP3-AA¹¹-AA¹²; wherein PEP3 is selected from the group consisting of VPT, VPE, APT, TPT, VPA, APV, VPQ and VSQ; wherein AA¹¹ is selected from the group consisting of E, K, Q, R, A, D, G and H, in particular E, K, Q, R, A and D; wherein AA¹² is selected from the group consisting of L, M, T, E, Q and H, in particular selected from the group consisting of L, M and T; wherein AA¹, AA², AA³, AA⁴, and AA⁵ are independently absent or AA^{I} as defined herein; wherein AA⁶ is absent or selected from the group consisting of S, T, C, E, Q, P and R, preferably is selected from the group consisting of C, S and T; wherein AA⁷ is selected from the group consisting of S, T, C, E, Q, P and R, preferably is C or S. In one particular example, PEP9 is selected from the group consisting of KIPKAXXVPTEL, GIPEPXXVPEKM, SIPKAXXVPTEL, HVTKPTXAPTKL, YVPKPXXAPTKL, TVPKPXXAPTQL, AVPKAXXAPTKL, KVGKAXXVPTKL, KASKAXXVPTKL, GSAGPXXTPTKM, AAPASXXVPARL, STPPTXXVPTRL, HVPKPXXAPTKL, RVPSTXXAPVKT, ASAAPXXVPQAL, ASASPXXVSQDL and ASASPXXVPQDL.

[0590] In certain embodiments useful for inducing the conversion of a neoplastic cell into a cell (any cell) of the lung cell lineage, PEP12 is a peptide of general formula PEP1-AA¹⁷-PEP11; wherein AA¹⁷ is selected from the group consisting of G, A, V, L, I, P, F, M, W, T and S (in particular is selected from the group consisting of M, I, L, V and T); wherein PEP1 is selected from the group consisting of NAIS, SATS, SPIS, EPIS and SPIN.

[0591] In certain embodiments useful for inducing the conversion of a neoplastic cell into a cell (any cell) of the lung cell lineage, PEP11 is a peptide with 3 amino acids of general formula AA¹⁸-AA¹⁹-AA²⁰; wherein AA¹⁸ is selected from the group consisting of L, V, Q, A and R, in particular is L; wherein AA¹⁹ is selected from the group consisting of F, W, H and Y (in particular is a polar aromatic amino acid such as Y); wherein AA²⁰ is selected from the group consisting of L, F, Y, K, I, V and M, in particular is selected from the group consisting of L, F, Y, and K. In one particular example, PEP11 is selected from the group consisting of LYF, LYY, LYK and LYL.

[0592] In certain embodiments useful for inducing the conversion of a neoplastic cell into a cell (any cell) of the lung cell lineage, PEP1 is selected from the group consisting of NAIS, SATS, SPIS, EPIS and SPIN; PEP11 is selected from the group consisting of LYF, LYY, LYK and LYL; and the pair PEP1:PEP11 is selected from the group consisting of NAIS:LYF, SATS:LYY, SPIS:LYK, EPIS:LYL and SPIN:LYF.

[0593] The definitions of “PEP” pairs and triplets e.g. PEP3:PEP1, PEP5:PEP12, or PEP7:PEP5:PEP1, also most particularly useful for inducing the conversion of a neoplastic cell into a cell (any cell) of the lung cell lineage, are as already defined herein to the extent that PEP1, PEP3, PEP5, PEP7, PEP9, PEP11 and PEP12 are particularly useful for these applications as defined in the present lung section.

[0594] In certain embodiments useful for inducing the conversion of a neoplastic cell into a cell (any cell) of the lung cell lineage, said GFR-binding compound is a synthetic molecule as defined herein in the definition section.

[0595] In certain embodiments useful for inducing the conversion of a neoplastic cell into a cell (any cell) of the lung cell lineage, said GFR-binding compound is a synthetic peptide, or a variant or analog thereof, or a peptidomimetic.

[0596] Muscle Cell Lineage

[0597] Certain embodiments of the invention are particularly useful for inducing the conversion of a neoplastic cell into a cell (any cell) of the muscle cell lineage.

[0598] In certain embodiments useful for inducing the conversion of a neoplastic cell into a cell (any cell) of the muscle cell lineage, PEP1 is RSVK or RPVQ.

[0599] In certain embodiments useful for inducing the conversion of a neoplastic cell into a cell (any cell) of the muscle cell lineage, PEP3 is selected from the group consisting of VPQ, VSQ, VPT, SRV and TQV.

[0600] In certain embodiments useful for inducing the conversion of a neoplastic cell into a cell (any cell) of the muscle cell lineage, PEP5 is a peptide of general formula PEP3-AA¹¹-AA¹²; wherein PEP3 is selected from the group consisting of VPQ, VSQ, VPT, SRV and TQV; wherein AA¹¹ is selected from the group consisting of E, K, Q, R, A, D, G and H, in particular A, D, E, H, Q and G; wherein AA¹² is selected from the group consisting of L, M, T, E, Q and H, in particular L, E, H and Q. In one particular example, PEP5 is selected from the group consisting of VPQAL, VSQDL, VPQDL, VPTEE, VPTGQ, SRVHH and TQVQL.

[0601] In certain embodiments useful for inducing the conversion of a neoplastic cell into a cell (any cell) of the muscle cell lineage, PEP7 is an amino acid or a peptide with between two and seven amino acids of general formula AA¹-AA²-AA³-AA⁴-AA⁵-AA⁶-AA⁷; wherein AA¹, AA², AA³, AA⁴, and AA⁵ are independently absent or AA^{I} as defined herein; wherein AA⁶ is absent or selected from the group consisting of S, T, C, E, Q, P and R, preferably C, S, Q, R or E; wherein AA⁷ is absent or is selected from the group consisting of S, T, C, E, Q, P and R, preferably is S, P or C; and wherein at least one of AA¹, AA², AA³, AA⁴, AA⁵, AA⁶ or AA⁷ is not absent. In one particular example, PEP7 is selected from the group consisting of ASAAPXX, ASASPXX, NDEGLEX, SSVKXQP and RNVQXRP.

[0602] In certain embodiments useful for inducing the conversion of a neoplastic cell into a cell (any cell) of the muscle cell lineage, PEP9 is a peptide of general formula AA¹-AA²-AA³-AA⁴-AA⁵-AA⁶-AA⁷-PEP5; wherein PEP5 is a peptide of formula PEP3-AA¹¹-AA¹²; wherein PEP3 is selected from the group consisting of VPQ, VSQ, VPT, SRV and TQV; wherein AA¹¹ is selected from the group consisting of E, K, Q, R, A, D, G and H, in particular A, D, E, H, Q and G; wherein AA¹² is selected from the group consisting of L, M, T, E, Q and H, in particular L, E, H and Q; wherein AA¹, AA², AA³, AA⁴, and AA⁵ are independently absent or AA^{I} as defined herein; wherein AA⁶ is absent or selected from the group consisting of S, T, C, E, Q, P and R, preferably C, S, Q, R or E; wherein AA⁷ is absent or is selected from the group consisting of S, T, C, E, Q, P and R, preferably is S, P or C. In one particular example, PEP9 is selected from the group consisting of ASAAPXXVPQAL, ASASPXXVSQDL, ASASPXXVPQDL, NDEGLEXVPTEE, NDEGLEXVPTGQ, SSVKXQPSRVHH and RNVQXRPTQVQL.

[0603] In certain embodiments useful for inducing the conversion of a neoplastic cell into a cell (any cell) of the muscle cell lineage, PEP12 is a peptide of general formula PEP1-AA¹⁷-PEP11; wherein AA¹⁷ is selected from the group consisting of G, A, V, L, I, P, F, M, W, T and S (in particular is I or M); wherein PEP1 is RSVK or RPVQ.

[0604] In certain embodiments useful for inducing the conversion of a neoplastic cell into a cell (any cell) of the muscle cell lineage, PEP11 is a peptide with 3 amino acids of general formula AA¹⁸-AA¹⁹-AA²⁰; wherein AA¹⁸ is selected from the group consisting of L, V, Q, A and R, in particular is A or R; wherein AA¹⁹ is selected from the group consisting of AA^{VII} amino acids (in particular is K); wherein AA²⁰ is selected from the group consisting of L, F, Y, K, I, V and M, in particular is V or I. In one particular example, PEP11 is AKV or RKI.

[0605] In certain embodiments useful for inducing the conversion of a neoplastic cell into a cell (any cell) of the muscle cell lineage, PEP1 is RSVK or RPVQ; PEP11 is is AKV or RKI; and the pair PEP1:PEP11 is RSVK:AKV or RPVQ:RKI.

[0606] The definitions of “PEP” pairs and triplets e.g. PEP3:PEP1, PEP5:PEP12, or PEP7:PEP5:PEP1, useful for inducing the conversion of a neoplastic cell into a cell (any cell) of the muscle cell lineage, are as already defined herein to the extent that PEP1, PEP3, PEP5, PEP7, PEP9, PEP11 and PEP12 are particularly useful for these applications as defined in the present muscle section.

[0607] In certain embodiments useful for inducing the conversion of a neoplastic cell into a cell (any cell) of the muscle cell lineage, said GFR-binding compound is a synthetic molecule as defined herein in the definition section.

[0608] In certain embodiments useful for inducing the conversion of a neoplastic cell into a cell (any cell) of the muscle cell lineage, said GFR-binding compound is a synthetic peptide, or a variant or analog thereof, or a peptidomimetic.

[0609] Blood Cell Lineage

[0610] Certain embodiments of the invention are particularly useful for inducing the conversion of a neoplastic cell into a cell (any cell) of the blood cell lineage.

[0611] In certain embodiments useful for inducing the conversion of a neoplastic cell into a cell (any cell) of the blood cell lineage, PEP1 is SNIT.

[0612] In certain embodiments useful for inducing the conversion of a neoplastic cell into a cell (any cell) of the blood cell lineage, PEP3 is selected from the group consisting of TPT, VPA, VPT, APT, APV, VPQ, VSQ, SRV and TQV.

[0613] In certain embodiments useful for inducing the conversion of a neoplastic cell into a cell (any cell) of the blood cell lineage, PEP5 is a peptide of general formula PEP3-AA¹¹-AA¹²; wherein PEP3 is selected from the group consisting of TPT, VPA, VPT, APT, APV, VPQ, VSQ, SRV and TQV; wherein AA¹¹ is selected from the group consisting of E, K, Q, R, A, D, G and H; wherein AA¹² is selected from the group consisting of L, M, T, E, Q and H. In one particular example, PEP5 is selected from the group consisting of TPTKM, VPARL, VPTRL, APTKL, APVKT, VPQAL, VSQDL, VPQDL, VPTEE, VPTGQ, SRVHH and TQVQL.

[0614] In certain embodiments useful for inducing the conversion of a neoplastic cell into a cell (any cell) of the blood cell lineage, PEP7 is an amino acid or a peptide with between two and seven amino acids of general formula AA¹-AA²-AA³-AA⁴-AA⁵-AA⁶-AA⁷; wherein AA¹, AA², AA³, AA⁴, and AA⁵ are independently absent or AA^{I} as defined herein; wherein AA⁶ is absent or selected from the group consisting of S, T, C, E, Q, P and R, preferably is selected from the group consisting of S, C, E, Q and R; wherein AA⁷ is absent or is selected from the group consisting of S, T, C, E, Q, P and R, preferably is selected from the group consisting of C, S and P; and wherein at least one of AA¹, AA², AA³, AA⁴, AA⁵, AA⁶ or AA⁷ is not absent. In one particular example, PEP7 is selected from the group consisting of GSAGPXX, AAPASXX, STPPTXX, HVPKPXX, RVPSTXX, ASAAPXX, ASASPXX, NDEGLEX, SSVKXQP and RNVQXRP.

[0615] In certain embodiments useful for inducing the conversion of a neoplastic cell into a cell (any cell) of the blood cell lineage, PEP9 is a peptide of general formula AA¹-AA²-AA³-AA⁴-AA⁵-AA⁶-AA⁷-PEP5; wherein PEP5 is a peptide of formula PEP3-AA¹¹-AA¹²; wherein PEP3 is selected from the group consisting of TPT, VPA, VPT, APT, APV, VPQ, VSQ, SRV and TQV; wherein AA¹¹ is selected from the group consisting of E, K, Q, R, A, D, G and H; wherein AA¹² is selected from the group consisting of L, M, T, E, Q and H; wherein AA¹, AA², AA³, AA⁴, and AA⁵ are independently absent or AA^{I} as defined herein; wherein AA⁶ is absent or selected from the group consisting of S, T, C, E, Q, P and R, preferably is selected from the group consisting of S, C, E, Q and R; wherein AA⁷ is absent or is selected from the group consisting of S, T, C, E, Q, P and R, preferably is selected from the group consisting of C, S and P. In one particular example, PEP9 is selected from the group consisting of GSAGPXXTPTKM, AAPASXXVPARL, STPPTXXVPTRL, HVPKPXXAPTKL, RVPSTXXAPVKT, ASAAPXXVPQAL, ASASPXXVSQDL, ASASPXXVPQDL, NDEGLEXVPTEE, NDEGLEXVPTGQ, SSVKXQPSRVHH and RNVQXRPTQVQL.

[0616] In certain embodiments useful for inducing the conversion of a neoplastic cell into a cell (any cell) of the blood cell lineage, PEP12 is a peptide of general formula PEP1-AA¹⁷-PEP11; wherein AA¹⁷ is selected from the group consisting of G, A, V, L, I, P, F, M, W, T and S (in particular is selected from the group consisting of M, I, V and T); wherein PEP1 is SNIT.

[0617] In certain embodiments useful for inducing the conversion of a neoplastic cell into a cell (any cell) of the blood cell lineage, PEP11 is a peptide with 3 amino acids of general formula AA¹⁸-AA¹⁹-AA²⁰; wherein AA¹⁸ is selected from the group consisting of L, V, Q, A and R, in particular is Q; wherein AA¹⁹ is selected from the group consisting of F, W, H, I and Y (in particular is I); wherein AA²⁰ is selected from the group consisting of L, F, Y, K, I, V and M, in particular is M. In one particular example, PEP11 is QIM.

[0618] In certain embodiments useful for inducing the conversion of a neoplastic cell into a cell (any cell) of the blood cell lineage, PEP1 is SNIT and PEP11 is QIM.

[0619] The definitions of “PEP” pairs and triplets e.g. PEP3:PEP1, PEP5:PEP12, or PEP7:PEP5:PEP1, useful for inducing the conversion of a neoplastic cell into a cell (any cell) of the blood cell lineage, are as already defined herein to the extent that PEP1, PEP3, PEP5, PEP7, PEP9, PEP11 and PEP12 are particularly useful for these applications as defined in the present blood section.

[0620] In certain embodiments useful for inducing the conversion of a neoplastic cell into a cell (any cell) of the blood cell lineage, said GFR-binding compound is a synthetic molecule as defined herein in the definition section.

[0621] In certain embodiments useful for inducing the conversion of a neoplastic cell into a cell (any cell) of the blood cell lineage, said GFR-binding compound is a synthetic peptide, or a variant or analog thereof, or a peptidomimetic.

[0622] Adipocyte Cell Lineage

[0623] Certain embodiments of the invention are particularly useful for inducing the conversion of a neoplastic cell into a cell (any cell) of the adipocyte lineage.

[0624] In certain embodiments useful for inducing the conversion of a neoplastic cell into a cell (any cell) of the adipocyte lineage, PEP1 is SAIS or NAIS.

[0625] In certain embodiments useful for inducing the conversion of a neoplastic cell into a cell (any cell) of the adipocyte lineage, PEP3 is selected from the group consisting of VPT, VPE, APT, TPT, VPA, APV, VPQ and VSQ.

[0626] In certain embodiments useful for inducing the conversion of a neoplastic cell into a cell (any cell) of the adipocyte lineage, PEP5 is a peptide of general formula PEP3-AA¹¹-AA¹²; wherein PEP3 is selected from the group consisting of VPT, VPE, APT, TPT, VPA, APV, VPQ and VSQ; wherein AA¹¹ is selected from the group consisting of E, K, Q, R, A, D, G and H, in particular is selected from the group consisting of E, K, Q, R, A and D; wherein AA¹² is selected from the group consisting of L, M, T, E, Q and H, in particular selected from the group consisting of L, M and T. In one particular example, PEP5 is selected from the group consisting of VPTEL, VPEKM, APTKL, APTQL, VPTKL, TPTKM, VPARL, VPTRL, APVKT, VPQAL, VSQDL and VPQDL.

[0627] In certain embodiments useful for inducing the conversion of a neoplastic cell into a cell (any cell) of the adipocyte lineage, PEP7 is an amino acid or a peptide with between two and seven amino acids of general formula AA¹-AA²-AA³-AA⁴-AA⁵-AA⁶-AA⁷; wherein AA¹, AA², AA³, AA⁴, and AA⁵ are independently absent or AA^{I} as defined herein; wherein AA⁶ is absent or selected from the group consisting of S, T, C, E, Q, P and R, preferably is selected from the group consisting of C, S and T; wherein AA⁷ is absent or is selected from the group consisting of S, T, C, E, Q, P and R, preferably is C or S; and wherein at least one of AA¹, AA², AA³, AA⁴, AA⁵, AA⁶ or AA⁷ is not absent. In one particular example, PEP7 is selected from the group consisting of KIPKAXX, GIPEPXX, SIPKAXX, HVTKPTX, YVPKPXX, TVPKPXX, AVPKAXX, KVGKAXX, KASKAXX, GSAGPXX, AAPASXX, STPPTXX, HVPKPXX, RVPSTXX, ASAAPXX and ASASPXX.

[0628] In certain embodiments useful for inducing the conversion of a neoplastic cell into a cell (any cell) of the adipocyte lineage, PEP9 is a peptide of general formula AA¹-AA²-AA³-AA⁴-AA⁵-AA⁶-AA⁷-PEP5; wherein PEP5 is a peptide of formula PEP3-AA¹¹-AA¹²; wherein PEP3 is selected from the group consisting of VPT, VPE, APT, TPT, VPA, APV, VPQ and VSQ; wherein AA¹¹ is selected from the group consisting of E, K, Q, R, A, D, G and H, in particular E, K, Q, R, A and D; wherein AA¹² is selected from the group consisting of L, M, T, E, Q and H, in particular selected from the group consisting of L, M and T; wherein AA¹, AA², AA³, AA⁴, and AA⁵ are independently absent or AA^{I} as defined herein; wherein AA⁶ is absent or selected from the group consisting of S, T, C, E, Q, P and R, preferably is selected from the group consisting of C, S and T; wherein AA⁷ is selected from the group consisting of S, T, C, E, Q, P and R, preferably is C or S. In one particular example, PEP9 is selected from the group consisting of KIPKAXXVPTEL, GIPEPXXVPEKM, SIPKAXXVPTEL, HVTKPTXAPTKL, YVPKPXXAPTKL, TVPKPXXAPTQL, AVPKAXXAPTKL, KVGKAXXVPTKL, KASKAXXVPTKL, GSAGPXXTPTKM, AAPASXXVPARL, STPPTXXVPTRL, HVPKPXXAPTKL, RVPSTXXAPVKT, ASAAPXXVPQAL, ASASPXXVSQDL and ASASPXXVPQDL.

[0629] In certain embodiments useful for inducing the conversion of a neoplastic cell into a cell (any cell) of the adipocyte lineage, PEP12 is a peptide of general formula PEP1-AA¹⁷-PEP11; wherein AA¹⁷ is selected from the group consisting of G, A, V, L, I, P, F, M, W, T and S (in particular is selected from the group consisting of M, V and T); wherein PEP1 is SAIS or NAIS.

[0630] In certain embodiments useful for inducing the conversion of a neoplastic cell into a cell (any cell) of the adipocyte lineage, PEP11 is a peptide with 3 amino acids of general formula AA¹⁸-AA¹⁹-AA²⁰; wherein AA¹⁸ is selected from the group consisting of L, V, Q, A and R, in particular is L; wherein AA¹⁹ is selected from the group consisting of F, W, H and Y (in particular is a polar aromatic amino acid such as Y); wherein AA²⁰ is selected from the group consisting of L, F, Y, K, I, V and M, in particular is L or F. In one particular example, PEP11 is LYL or LYF.

[0631] In certain embodiments useful for inducing the conversion of a neoplastic cell into a cell (any cell) of the adipocyte lineage, PEP1 is SAIS or NAIS; PEP11 is LYL or LYF; and the pair PEP1:PEP11 is SAIS:LYL or NAIS:LYF.

[0632] The definitions of “PEP” pairs and triplets e.g. PEP3:PEP1, PEP5:PEP12, or PEP7:PEP5:PEP1, also most particularly embodiments useful for inducing the conversion of a neoplastic cell into a cell (any cell) of the adipocyte lineage, are as already defined herein to the extent that PEP1, PEP3, PEP5, PEP7, PEP9, PEP11 and PEP12 are particularly useful for these applications as defined in the present adipose tissue section.

[0633] In certain embodiments useful for inducing the conversion of a neoplastic cell into a cell (any cell) of the adipocyte lineage, said GFR-binding compound is a synthetic molecule as defined herein in the definition section.

[0634] In certain embodiments useful for inducing the conversion of a neoplastic cell into a cell (any cell) of the adipocyte lineage, said GFR-binding compound is a synthetic peptide, or a variant or analog thereof, or a peptidomimetic.

[0635] III. Adhesion Protein Inhibitor

[0636] The present invention achieves its intended therapeutic action(s) i.e. the treatment of a neoplastic disease via extracellular, non-mutagenic, recoding or conversion of neoplastic cells, by providing an association (or combination) of at least two bioactive substances, namely, at least one GFR-binding compound as described herein and at least one adhesion protein inhibitor or adhesion molecule inhibitor.

[0637] In one aspect, the present disclosure thus provides at least one adhesion protein inhibitor, as part of a pharmaceutical association or combination as defined herein, as an active principle for use in methods and uses described herein.

[0638] In one example, said GFR-binding compound and said adhesion protein inhibitor may be operably covalently or non-covalently associated, combined, linked or connected as defined herein.

[0639] Various methods known in the art may be used to assess the deactivation or inhibitory activity or potency of a given adhesion protein inhibitor on a given adhesion protein such an integrin or a syndecan. However, for the avoidance of doubts and for the purpose of the present disclosure, the assessment of the inhibition or deactivation of adhesion protein(s) by a given adhesion protein inhibitor as defined herein (alone or within a pharmaceutical association, combination or composition as defined herein) is performed using fluorescence resonance energy transfer (FRET). This method is able to measure with high precision the degree of protein conformational changes that are associated with the action of a specific adhesion protein inhibitor on a given adhesion protein and thus quantify the inhibitory effect of the adhesion protein inhibitor. FRET is a well-known and recognised analytical method, but for the avoidance of doubts and for the purpose of the present disclosure, the experimental procedures, parameters and setup are those described in Chigaev, A., Buranda, T., Dwyer, D. C., Prossnitz, E. R. and Sklar, L. A. (2003), “FRET detection of cellular α4-integrin conformational activation”, Biophys., J. 85, 3951-3962, which is hereby incorporated by reference in its entirety.

[0640] One particular biological checkpoint that the present invention is able to re-establish, repair or restore is the cell adhesion checkpoint. The cell adhesion checkpoint is known to be in charge of monitoring the cells attachments to the extracellular matrix (ECM). In normal conditions, when a cell does not detect a “correct” attachment it should halt further advance through the cell cycle and enter the G0 phase.

[0641] Cell adhesion is the binding of a cell to a surface or substrate, such as the extracellular matrix (ECM). Adhesion occurs from the action (or engagement) of proteins, called cell adhesion proteins or molecules. Examples of such cell adhesion proteins are cell transmembrane adhesion proteins, such as the integrins, syndecans, selectins and dystroglycans. The most important among these proteins are the integrins, which assemble as alpha-beta heterodimers.

[0642] III.1. Integrins

[0643] The integrins belong to a superfamily of cell adhesion receptors that bind to extracellular matrix ligands, cell-surface ligands, and soluble ligands. They are transmembrane αβ heterodimers and at least 18 α and 8 β subunits are known in humans, generating 24 heterodimers such as α1β1, α2β1, α3β1, α4β1, α5β1, α6β1, α7β1, αLβ2, αMβ2, αIIbβ3, αVβ1, αVβ3, αVβ5, αVβ6, αVβ8, and α6β4. Members of this family have been found in mammals, chicken and zebrafish, as well as lower eukaryotes. The α and β subunits have distinct domain structures, with extracellular domains from each subunit contributing to the ligand-binding site of the heterodimer. The sequence arginine-glycine-aspartic acid (RGD) was identified as a general integrin-binding motif, but individual integrins are also specific for particular protein ligands. In addition to physically linking the cell to the extracellular matrix, the binding of the extracellular integrin domains to specific components of the ECM activates the integrins and allows binding of different signalling molecules to their intracellular domain. This activates various signalling pathways that mediate signals to the adhesion checkpoint.

[0644] The activation of an integrin is associated with structural conformational changes of the protein. Integrins are known to adopt three major conformational states: «inactive» (low affinity), «primed» or «active» (high affinity), and ligand occupied (which may be activated or not depending on the nature of the ligand). The active form of the protein is considered as having an «extended» conformation while the inactive form is considered as «bent» with bending of the ligand-binding headpiece of its extracellular domain. Upon activation the integrin proceeds with an unbending of this domain to acquire the extended conformation, which is able to bind the ECM components. This process initiates further conformational changes, which activate, through the intracellular domain several signaling pathway cascades.

[0645] In the present disclosure, the pharmaceutical association, combination or (therapeutic, dermatologic, ophthalmologic, diagnostic, etc.) composition defined herein is thus suitable for treating a neoplastic cell or a neoplastic disease (i) by activating one or more growth factor receptors and (ii) by, simultaneously or non-simultaneously, modulating or regulating the adhesion of that cell to its ECM microenvironment by (partially or completely) deactivating or inhibiting at least one integrin expressed on the cell membrane of said neoplastic cell. In certain embodiments, and without wishing to be bound to any specific theory, the deactivation or inhibition of an integrin may be the result of, for example, integrin's inactivation, integrin's dimerisation inhibition, and/or integrin's gene expression inhibition.

[0646] In certain embodiments, the adhesion protein inhibitor as defined herein comprises (or is) an integrin deactivator or inhibitor which binds to/interacts with at least one integrin and/or to at least one integrin dimer. In one example, said integrin deactivator or inhibitor is a receptor competitive antagonist. In one example, said integrin deactivator or inhibitor is a receptor non-competitive antagonist. In one example, said integrin deactivator or inhibitor is a receptor uncompetitive antagonist. In one example, said integrin deactivator or inhibitor is a receptor silent antagonist. In one example, said integrin deactivator or inhibitor is a receptor partial agonist. In one example, said integrin deactivator or inhibitor is a receptor inverse agonist.

[0647] In one aspect, the present disclosure thus provides a pharmaceutical association or combination or (therapeutic, dermatologic, ophthalmologic, diagnostic, etc.) composition as defined herein comprising at least one GFR-binding compound as defined herein and at least one inhibitor of integrin engagement with the ECM.

[0648] In certain embodiments, said at least one inhibitor of integrin engagement with the ECM is an anti-integrin antibody. One aspect of the present disclosure thus also provides a pharmaceutical association or combination or (therapeutic, dermatologic, ophthalmologic, diagnostic, etc.) composition as defined herein comprising at least one GFR-binding compound as defined herein and at least one integrin antibody.

[0649] In one example, said integrin antibody is selected from the group consisting of, Integrin α1 (A-9), Integrin α1 (F-19), Integrin α1 (HM alpha 1), Integrin α1 (R-164), Integrin α1 (R-19), Integrin α1 (TS2/7.1.1), Integrin α2 (H-293), Integrin α2 (N-19), Integrin α2 (C-9), Integrin α2 (P1H5), Integrin α2 (P1 E6), Integrin α2 (HAS-4), Integrin α2 (P4B4), Integrin α2 (HAS-3), Integrin α2 (2), Integrin α3 (A-3), Integrin α3 (A-6), Integrin α3 (I-19), Integrin α3 (C-18), Integrin α3 (E-8), Integrin α3 (P1B5), Integrin α3 (H-43), Integrin α3 (Ralph 3.2), Integrin α3 (N-19), Integrin α3 (VM-2), Integrin α3 (IA3), Integrin α3 (F35 177-1), Integrin α4 (A-7), Integrin α4 (C-2), Integrin α4 (H-210), Integrin α4 (B-2), Integrin α4 (C-20), Integrin α4 (N-19), Integrin α4 (9F10), Integrin α4 (Y-18), Integrin α4 (PS/2), Integrin α5 (H-104), Integrin α5 (P-19), Integrin α5 (C-9), Integrin α5 (A-11), Integrin α5 (B-4), Integrin α5 (D-9), Integrin α5 (HMα5-1), Integrin α5 (P1D6), Integrin α5 (MFR5/5H10), Integrin α5 (JBS5), Integrin α5 (SAM-1), Integrin α5 (1), Integrin α6 (F-6), Integrin α6 (H-87), Integrin α6 (N-19), Integrin α6 (BQ16), Integrin α6 (GOH3), Integrin α6 (C-18), Integrin α6 (4F10), Integrin α6 (541A11), Integrin α6 (mAB-5A), Integrin α6 (450-30A), Integrin α6 (NKI-GOH3), Integrin α6 (3H1512), Integrin α6 (2Q959), Integrin α6 (1.BB.460), Integrin α7 (L-17), Integrin α7 (H-40), Integrin α7 (C-15), Integrin α7 (012-Z), Integrin α8 (F-11), Integrin α8 (F-19), Integrin α8 (T-20), Integrin α8 (H-180), Integrin α8 (S-16), Integrin α9 (N-19), Integrin α9 (H-198), Integrin α10 (E-15), Integrin α10 (S-14), Integrin α11 (H-242), Integrin α11 (Y-16), Integrin α11 (F-5), Integrin α11 (E-20), Integrin αIIb (B-10), Integrin αIIb (B-9), Integrin αIIb (H-160), Integrin αIIb (C-20), Integrin αIIb (A-7), Integrin αIIb (K-18), Integrin αIIb (96-2C1), Integrin αIIb (MWReg30), Integrin αIIb (SZ.22), Integrin αIIb (M-148), Integrin αIIIa (158A3), Integrin αIIIa (29A3), Integrin αIIIb (54B3), Integrin αVIa (1A10), Integrin αVIb (6B4), Integrin αIIIb/VIb (PB36), Integrin αD (T-17), Integrin αE (H-260), Integrin αE (N-19), Integrin αE (Ber-ACT8), Integrin αE (R-15), Integrin αE (OX62), Integrin αE (BP6), Integrin αL (E-1), Integrin αL (C-11), Integrin αL (N-18), Integrin αL (Y-17), Integrin αL (H-300), Integrin αL (C-17), Integrin αL (F-11), Integrin αL (38), Integrin αL (16B8), Integrin αL (HI111), Integrin αL (I21/7), Integrin αL (CRIS-3), Integrin αL (27), Integrin αM (M-19), Integrin αM (H-61), Integrin αM (2LPM19c), Integrin αM (44), Integrin αM (1B6e), Integrin αM (C-19), Integrin αM (OX42), Integrin αM (VIM12), Integrin αM (LM2/1), Integrin αM (ICRF44), Integrin αM (M1/70), Integrin αM (CBRM1/5), Integrin αM (M1/70.15.11.5.HL), Integrin αM (LM2/1.6.11), Integrin αM (2B2.38), Integrin αM (CC125), Integrin αM (CC104), Integrin αM (Bear-1), Integrin αM (6A248), Integrin αM (2Q913), Integrin αM (3A33), Integrin αM (MEM-174), Integrin αV (H-2), Integrin αV (Q-20)-R, Integrin αV (P2W7), Integrin αV (H-75), Integrin αV (T-20), Integrin αV (N-19), Integrin αV (2Q888), Integrin αV (13C2), Integrin αV (NKI-M9), Integrin αX (B-6), Integrin αX (BU15), Integrin αX (D-8), Integrin αX (G-3), Integrin αX (KB90), Integrin αX (3.9), Integrin αX (B-Iy6), Integrin αX (HC1/1), Integrin αX (2Q862), Integrin αX (2B2.36), Integrin αX (2Q865), Integrin αX (F-20), Integrin αX (H-68), Integrin αX (N-19), Integrin αX (M-50), Integrin αX (C-20), Integrin αX (M-20), Integrin αX (N418), Integrin αX (R-113), Integrin αX (3H986), Integrin β1 (A-4), Integrin β1 (E-11), Integrin β1 (N-20), Integrin β1 (K-20), Integrin β1 (M-106), Integrin β1 (P5D2), Integrin β1 (L-16), Integrin β1 (HMβ1-1), Integrin β1 (4B7R), Integrin β1 (P4G11), Integrin β1 (JB1B), Integrin β1 (12G10), Integrin β1 (102DF5), Integrin β1 (TS2/16), Integrin α9/β1 (Y9A2), Integrin β1 (MEM-101A), Integrin β1 (2Q837), Integrin β1 (3H1192), Integrin α2/β1 (16B4), Integrin α9/β1 (2Q954), Integrin α2/β1 (2B2.29), Integrin α2/β1 (3H1472), Integrin β2 (CTB104), Integrin β2 (F-3), Integrin β2 (N-19), Integrin β2 (M18/2), Integrin β2 (H-120), Integrin β2 (H-7), Integrin β2 (C-20), Integrin β2 (K-19), Integrin β2 (C-4), Integrin β2 (GAME-46), Integrin β2 (P4H9), Integrin β2 (C71/16), Integrin β2 (M18/2.a.12.7), Integrin β2 (1.BB.246), Integrin β2 (IB4), Integrin αL/M/X/β2 (24), Integrin β2 (3H1041), Integrin β2 (2B2.45), Integrin β2 (YTS 213.1), Integrin β2 (6G2), Integrin β2 (2Q822), Integrin β2 (L-13), Integrin β2 (6A21), Integrin β2 (MEM-48), Integrin β2 (MEM-148), Integrin β2 (IVA35), Integrin β3 (D-11), Integrin β3 (H-96), Integrin β3 (C-20), Integrin β3 (N-20), Integrin β3 (B-7), Integrin αIIb/β3 (A2A9/6), Integrin α/β3 (23C6), Integrin β3 (Y2/51), Integrin β3 (F-11), Integrin β3 (SAP), Integrin β3 (2C9.G2), Integrin αIIb/β3 (P256), Integrin β3 (BV4), Integrin β3 (NaM28-7D6), Integrin β3 (MHF4), Integrin β3 (5K291), Integrin β3 (PM6/13), Integrin αIIb/β3 (474), Integrin α/β3 (BV3), Integrin αIIb/β3 (IVA30), Integrin β4 (H-101), Integrin β4 (C-20), Integrin β4 (B-4), Integrin β4 (G-7), Integrin β4 (F-7), Integrin β4 (N-20), Integrin β4 (H-1), Integrin β4 (A9), Integrin β4 (7), Integrin β5 (B-10), Integrin β5 (H-96), Integrin β5 (B-1), Integrin β5 (E-18), Integrin β5 (E-19), Integrin β5 (F-5), Integrin αV/β5 (P1F76), Integrin αV/β5 (P1F6), Integrin β5 (4AK), Integrin β6 (H-110), Integrin β6 (C-19), Integrin β6 (N-20), Integrin β7 (C-2), Integrin β7 (C-20), Integrin β7 (N-18), Integrin β7 (FIB504), Integrin β7 (H-120), Integrin β7 (E-19), Integrin α4/β7 (DATK32), Integrin β8 (E-6), Integrin β7 (LS722), Integrin β8 (G-17), Integrin β8 (H-160), Integrin β8 (C-19), Integrin βId (2B1), Integrin βId (1G2), Integrin βL1 (F-21), and Integrin βL1 (N-15). Conveniently, the integrin antibody or antibodies is/are the antibody or antibodies which is/are predominantly expressed on the surface of a given neoplastic cell and will thus vary according to the type and nature of the neoplastic cell to be treated using the recoding therapy as defined herein.

[0650] In certain embodiments, said at least one inhibitor of integrin engagement with the ECM is a Arginylglycylaspartic acid (RGD) peptide. One aspect of the present disclosure thus also provides a pharmaceutical association or combination or (therapeutic, dermatologic, ophthalmologic, diagnostic, etc.) composition as defined herein comprising at least one GFR-binding compound as defined herein and at least one RGD peptide.

[0651] In certain embodiments, the adhesion protein inhibitor as defined herein comprises (or is) an integrin deactivator or inhibitor which inhibits or down-regulates the gene or protein expression of at least one integrin by e.g. alteration of the chromatin structure (e.g. through histone modifications), regulation of gene transcription (e.g. by acting on specificity factors, repressors, general transcription factors, activators, enhancers and/or silencers), post-transcriptional regulation, and/or regulation of translation.

[0652] In one aspect, the present disclosure thus provides a pharmaceutical association or combination or (therapeutic, dermatologic, ophthalmologic, diagnostic, etc.) composition defined herein comprising at least one GFR-binding compound as defined herein and at least one small-interfering RNA (si-RNA) which interferes with or inhibit the gene or protein expression of at least one integrin.

[0653] Integrins expressed on the cell membrane of neoplastic cells may be identified using various methods. However, for the avoidance of doubts and for the purpose of the present disclosure, identification of such integrin(s) is performed using e.g. RT-PCR or western blot. Because, the type of integrins expressed on the cell membrane of a given cell (e.g. a neoplastic cell) may differ from the integrins expressed in the cell membrane of another (neoplastic) cell, prior identification of the integrins expressed on the cell membrane of a cell to be treated using a method such as RT-PCR, allows for a more tailored, personalised and/or efficient treatment to be provided.

[0654] In certain embodiments, the modulation or regulation of a neoplastic cell adhesion thus comprises (or is exclusively constituted of, or exclusively consists of) the inhibition, deactivation or down-regulation of the gene or protein expression of one or more identified integrins or dimers of integrins expressed by the neoplastic cell to be treated using, for example, conventional techniques known in the art such as gene silencing using small-interfering RNAs, microRNAs or shRNAs, integrin extracellular antibodies and/or integrin antagonists. The identification of said specific one or more integrins or dimers of integrins may be carried for each specific neoplastic cell using conventional methods in the art such as the one described herein.

[0655] Various methods known in the art may be used to qualify and/or quantify the degree of deactivation or inhibitory activity of a given adhesion protein inhibitor on the gene expression of integrins. However, for the avoidance of doubts and for the purpose of the present disclosure, assessment of integrins gene expression of a given cell by an adhesion protein inhibitor as defined herein is performed using RT-PCR as already defined herein.

[0656] Various methods known in the art may be used to qualify and/or quantify the degree of deactivation or inhibitory activity of a given adhesion protein inhibitor on the protein expression of integrins. However, for the avoidance of doubts and for the purpose of the present disclosure, assessment of integrins protein expression of a given cell by an adhesion protein inhibitor as defined herein is performed using the western blot method as already defined herein.

[0657] Various methods known in the art may be used to qualify and/or quantify the degree of activation or inactivation/inhibition state of integrins. However, for the avoidance of doubts and for the purpose of the present disclosure, assessment of the integrins activation or inactivation state of a given cell by an adhesion protein inhibitor as defined herein is performed using FRET as already defined herein.

[0658] Also provided is a method of treating a neoplastic cell or a neoplastic disease by (partially or completely) deactivating or inhibiting at least one integrin or dimer of integrins expressed on the cell membrane of said neoplastic cell, comprising administering to a subject in need thereof an effective amount of a pharmaceutical association, combination or (therapeutic, dermatologic, ophthalmologic, diagnostic, etc.) composition as defined herein.

[0659] Also provided is a method of treating a neoplastic cell or a neoplastic disease comprising identifying at least one integrin or dimer of integrin expressed on the membrane of said neoplastic cell, and (partially or completely) deactivating or inhibiting said at least one integrin or dimer of integrin by administering to a subject in need thereof an effective amount of a pharmaceutical association, combination or (therapeutic, dermatologic, ophthalmologic, diagnostic, etc.) composition as defined herein.

[0660] III.2. Syndecans

[0661] As used herein, unless indicated otherwise or contradictory in context, the term “syndecans” refers to single transmembrane domain proteins that are thought to act as co-receptors, especially for G protein-coupled receptors. These core proteins carry three to five heparan sulfate and chondroitin sulfate chains, which allow for interaction with a large variety of ligands including fibroblast growth factors, vascular endothelial growth factor, transforming growth factor-beta, fibronectin and antithrombin-1. Interactions between fibronectin and some syndecans can be modulated by the extracellular matrix protein tenascin C. The syndecan protein family has four members. Syndecans 1 and 3 and syndecans 2 and 4, making up separate subfamilies, arose by gene duplication and divergent evolution from a single ancestral gene. The syndecan numbers reflect the order in which the cDNAs for each family member were cloned. All syndecans have an N-terminal signal peptide, an ectodomain, a single hydrophobic transmembrane domain, and a short C-terminal cytoplasmic domain. All syndecans are anchored to plasma membrane via a 24-25 amino acid long hydrophobic transmembrane domain. In mammalian cells, syndecans are expressed by unique genes located on different chromosomes. All members of the syndecan family have 5 exons. The difference in size of the syndecans is credited to the variable length of exon 3, which encodes a spacer domain. In humans, the amino acid length of syndecan 1, 2, 3 and 4 is 310, 201, 346 and 198 respectively. Glycosaminoglycan chains, a member of the heparan sulfate group, are an important component of syndecans and are responsible for a diverse set of syndecan functions. The addition of glycosaminoglycans to syndecan is controlled by a series of post-translational events.

[0662] In the present disclosure, the pharmaceutical association, combination or (therapeutic, dermatologic, ophthalmologic, diagnostic, etc.) composition defined herein is thus suitable for treating a neoplastic cell or a neoplastic disease (i) by activating one or more growth factor receptors and (ii) by, simultaneously or non-simultaneously, modulating or regulating the adhesion of that cell with its ECM microenvironment by (partially or completely) deactivating or inhibiting at least one syndecan expressed on the cell membrane of said neoplastic cell. In certain embodiments, and without wishing to be bound to any specific theory, the deactivation or inhibition of a syndecan may be the result of, for example, syndecan's inactivation, syndecan's dimerisation inhibition, and/or syndecan's gene expression inhibition.

[0663] In certain embodiments, the adhesion protein inhibitor as defined herein comprises (or is) an syndecan deactivator or inhibitor which binds to/interacts with at least one syndecan and/or to at least one syndecan dimer. In one example, said syndecan deactivator or inhibitor is a receptor competitive antagonist. In one example, said syndecan deactivator or inhibitor is a receptor non-competitive antagonist. In one example, said syndecan deactivator or inhibitor is a receptor uncompetitive antagonist. In one example, said syndecan deactivator or inhibitor is a receptor silent antagonist. In one example, said syndecan deactivator or inhibitor is a receptor partial agonist. In one example, said syndecan deactivator or inhibitor is a receptor inverse agonist.

[0664] In one aspect, the present disclosure thus provides a pharmaceutical association or combination or (therapeutic, dermatologic, ophthalmologic, diagnostic, etc.) composition as defined herein comprising at least one GFR-binding compound as defined herein and at least one inhibitor of syndecan engagement.

[0665] In one aspect, the present disclosure thus provides a pharmaceutical association or combination or (therapeutic, dermatologic, ophthalmologic, diagnostic, etc.) composition defined herein comprising at least one GFR-binding compound as defined herein and at least one syndecan antibody.

[0666] In certain embodiments, the adhesion protein inhibitor as defined herein comprises (or is) a syndecan deactivator or inhibitor which inhibits or down-regulates the gene or protein expression of at least one syndecan by e.g. alteration of the chromatin structure (e.g. through histone modifications), regulation of gene transcription (e.g. by acting on specificity factors, repressors, general transcription factors, activators, enhancers and/or silencers), post-transcriptional regulation, and/or regulation of translation.

[0667] In one aspect, the present disclosure thus provides a pharmaceutical association or combination or (therapeutic, dermatologic, ophthalmologic, diagnostic, etc.) composition defined herein comprising at least one GFR-binding compound as defined herein and at least one small-interfering RNA (si-RNA) which interferes with or inhibit the gene or protein expression of at least one syndecan.

[0668] Syndecans expressed on the cell membrane of neoplastic cells may be identified using various methods. However, for the avoidance of doubts and for the purpose of the present disclosure, identification of such syndecan is performed using e.g. RT-PCR or western blot. Because, the type of syndecans expressed on the cell membrane of a given cell (e.g. a neoplastic cell) may differ from the syndecans expressed in the cell membrane of another (neoplastic) cell, prior identification of the syndecans expressed on the cell membrane of a cell to be treated using a method such as RT-PCR, allows for a more tailored, personalised and/or efficient treatment to be provided.

[0669] In certain embodiments, the modulation or regulation of a neoplastic cell adhesion thus comprises (or is exclusively constituted of, or exclusively consists of) the inhibition, deactivation or down-regulation of the gene or protein expression of one or more identified syndecans or dimers of syndecans expressed by the neoplastic cell to be treated using, for example, conventional techniques known in the art such as gene silencing using small-interfering RNAs, microRNAs, or shRNAs, syndecan extracellular antibodies and/or syndecan antagonists. The identification of said specific one or more syndecans or dimers of syndecans may be carried for each specific neoplastic cell using conventional methods in the art such as the one described herein.

[0670] Various methods known in the art may be used to qualify and/or quantify the degree of deactivation or inhibitory activity of a given adhesion protein inhibitor on the gene expression of syndecans. However, for the avoidance of doubts and for the purpose of the present disclosure, assessment of syndecans gene expression of a given cell by an adhesion protein inhibitor as defined herein is performed using RT-PCR as already defined herein.

[0671] Various methods known in the art may be used to qualify and/or quantify the degree of deactivation or inhibitory activity of a given adhesion protein inhibitor on the protein expression of syndecans. However, for the avoidance of doubts and for the purpose of the present disclosure, assessment of syndecans protein expression of a given cell by an adhesion protein inhibitor as defined herein is performed using the western blot method as already defined herein.

[0672] Various methods known in the art may be used to qualify and/or quantify the degree of activation or inactivation/inhibition state of syndecans. However, for the avoidance of doubts and for the purpose of the present disclosure, assessment of the syndecans activation or inactivation state of a given cell by an adhesion protein inhibitor as defined herein is performed using FRET as already defined herein.

[0673] Also provided is a method of treating a neoplastic cell or a neoplastic disease by (partially or completely) deactivating or inhibiting at least one syndecan or dimer of syndecans expressed on the cell membrane of said neoplastic cell, comprising administering to a subject in need thereof an effective amount of a pharmaceutical association, combination or (therapeutic, dermatologic, ophthalmologic, diagnostic, etc.) composition as defined herein.

[0674] Also provided is a method of treating a neoplastic cell or a neoplastic disease comprising identifying at least one syndecan or dimer of syndecan expressed on the membrane of said neoplastic cell, and (partially or completely) deactivating or inhibiting said at least one syndecan or dimer of syndecan by administering to a subject in need thereof an effective amount of a pharmaceutical association, combination or (therapeutic, dermatologic, ophthalmologic, diagnostic, etc.) composition as defined herein.

[0675] III.3. Selectins

[0676] The selectins are a family of cell adhesion molecules. All selectins are single-chain transmembrane glycoproteins. Selectins bind to sugar moieties and so are considered to be a type of lectin, cell adhesion proteins that bind sugar polymers. All three known members of the selectin family (L-, E-, and P-selectin) share a similar cassette structure: an N-terminal, calcium-dependent lectin domain, an epidermal growth factor (EGF)-like domain, a variable number of consensus repeat units (2, 6, and 9 for L-, E-, and P-selectin, respectively), a transmembrane domain (TM) and an intracellular cytoplasmic tail (cyto). Selectins have hinge domains, allowing them to undergo rapid conformational changes in the nanosecond range between ‘open’ and ‘closed’ conformations. Shear stress on the selectin molecule causes it to favor the ‘open’ conformation.

[0677] In the present disclosure, the pharmaceutical association, combination or (therapeutic, dermatologic, ophthalmologic, diagnostic, etc.) composition defined herein is thus suitable for treating a neoplastic cell or a neoplastic disease (i) by activating one or more growth factor receptors and (ii) by, simultaneously or non-simultaneously, modulating or regulating the adhesion of that cell to its ECM microenvironment by (partially or completely) deactivating or inhibiting at least one selectin expressed on the cell membrane of said neoplastic cell. In certain embodiments, and without wishing to be bound to any specific theory, the deactivation or inhibition of a selectin may be the result of, for example, selectin's inactivation, selectin's dimerisation inhibition, and/or selectin's gene expression inhibition.

[0678] In certain embodiments, the adhesion protein inhibitor as defined herein comprises (or is) an selectin deactivator or inhibitor which binds to/interacts with at least one selectin and/or to at least one selectin dimer. In one example, said selectin deactivator or inhibitor is a receptor competitive antagonist. In one example, said selectin deactivator or inhibitor is a receptor non-competitive antagonist. In one example, said selectin deactivator or inhibitor is a receptor uncompetitive antagonist. In one example, said selectin deactivator or inhibitor is a receptor silent antagonist. In one example, said selectin deactivator or inhibitor is a receptor partial agonist. In one example, said selectin deactivator or inhibitor is a receptor inverse agonist.

[0679] In one aspect, the present disclosure thus provides a pharmaceutical association or combination or (therapeutic, dermatologic, ophthalmologic, diagnostic, etc.) composition as defined herein comprising at least one GFR-binding compound as defined herein and at least one inhibitor of selectin engagement.

[0680] In one aspect, the present disclosure thus provides a pharmaceutical association or combination or (therapeutic, dermatologic, ophthalmologic, diagnostic, etc.) composition defined herein comprising at least one GFR-binding compound as defined herein and at least one selectin antibody.

[0681] In one example, said selectin antibody is selected from the group consisting of E-Selectin (H-300), E-Selectin (D-7), E-Selectin (CTB202), E-Selectin (A-10), E-Selectin (C-20), E-Selectin (P2H3), E-Selectin (M-20), E-Selectin (HAE-If), E-Selectin (1.2B6), E-Selectin (UZ5), E-Selectin (UZ6), E-Selectin (2Q780), E-Selectin (UZ4), L-Selectin (Iam1-116), L-Selectin (N-18), L-Selectin (H-149), L-Selectin (FMC46), L-Selectin (DREG56), L-Selectin (B-8), L-Selectin (DREG55), L-Selectin (OX85), L-Selectin (3H1611), P-Selectin (CTB201), P-Selectin (H-150), P-Selectin (C-20), P-Selectin (M-20), P-Selectin (AK4), P-Selectin (1 E 3), P-Selectin (H-2), P-Selectin (P8G6), P-Selectin (Psel.KO.2.9), P-Selectin (Psel.KO.2.7) and P-Selectin (CLB/thromb/6). Conveniently, the selectin antibody or antibodies is/are the antibody or antibodies which is/are predominantly expressed on the surface of a given neoplastic cell and will thus vary according to the type and nature of the neoplastic cell to be treated using the recoding therapy as defined herein.

[0682] In certain embodiments, the adhesion protein inhibitor as defined herein comprises (or is) a selectin deactivator or inhibitor which inhibits or down-regulates the gene or protein expression of at least one selectin by e.g. alteration of the chromatin structure (e.g. through histone modifications), regulation of gene transcription (e.g. by acting on specificity factors, repressors, general transcription factors, activators, enhancers and/or silencers), post-transcriptional regulation, and/or regulation of translation.

[0683] In one aspect, the present disclosure thus provides a pharmaceutical association or combination or (therapeutic, dermatologic, ophthalmologic, diagnostic, etc.) composition defined herein comprising at least one GFR-binding compound as defined herein and at least one small-interfering RNA (si-RNA) which interferes with or inhibit the gene or protein expression of at least one selectin.

[0684] Selectins expressed on the cell membrane of neoplastic cells may be identified using various methods. However, for the avoidance of doubts and for the purpose of the present disclosure, identification of such selectin(s) is performed using e.g. RT-PCR or western blot. Because, the type of selectins expressed on the cell membrane of a given cell (e.g. a neoplastic cell) may differ from the selectins expressed in the cell membrane of another (neoplastic) cell, prior identification of the selectins expressed on the cell membrane of a cell to be treated using a method such as RT-PCR, allows for a more tailored, personalised and/or efficient treatment to be provided.

[0685] In certain embodiments, the modulation or regulation of a neoplastic cell adhesion thus comprises (or is exclusively constituted of, or exclusively consists of) the inhibition, deactivation or down-regulation of the gene or protein expression of one or more identified selectins or dimers of selectins expressed by the neoplastic cell to be treated using, for example, conventional techniques known in the art such as gene silencing using small-interfering RNAs, microRNAs, or shRNAs, selectin extracellular antibodies and/or selectin antagonists. The identification of said specific one or more selectins or dimers of selectins may be carried for each specific neoplastic cell using conventional methods in the art such as the one described herein.

[0686] Various methods known in the art may be used to qualify and/or quantify the degree of deactivation or inhibitory activity of a given adhesion protein inhibitor on the gene expression of selectins. However, for the avoidance of doubts and for the purpose of the present disclosure, assessment of selectins gene expression of a given cell by an adhesion protein inhibitor as defined herein is performed using RT-PCR as already defined herein.

[0687] Various methods known in the art may be used to qualify and/or quantify the degree of deactivation or inhibitory activity of a given adhesion protein inhibitor on the protein expression of selectins. However, for the avoidance of doubts and for the purpose of the present disclosure, assessment of selectins protein expression of a given cell by an adhesion protein inhibitor as defined herein is performed using the western blot method as already defined herein.

[0688] Various methods known in the art may be used to qualify and/or quantify the degree of activation or inactivation/inhibition state of selectins. However, for the avoidance of doubts and for the purpose of the present disclosure, assessment of the selectins activation or inactivation state of a given cell by an adhesion protein inhibitor as defined herein is performed using FRET as already defined herein.

[0689] Also provided is a method of treating a neoplastic cell or a neoplastic disease by (partially or completely) deactivating or inhibiting at least one selectin or dimer of selectins expressed on the cell membrane of said neoplastic cell, comprising administering to a subject in need thereof an effective amount of a pharmaceutical association, combination or (therapeutic, dermatologic, ophthalmologic, diagnostic, etc.) composition as defined herein.

[0690] Also provided is a method of treating a neoplastic cell or a neoplastic disease comprising identifying at least one selectin or dimer of selectin expressed on the membrane of said neoplastic cell, and (partially or completely) deactivating or inhibiting said at least one selectin or dimer of selectin by administering to a subject in need thereof an effective amount of a pharmaceutical association, combination or (therapeutic, dermatologic, ophthalmologic, diagnostic, etc.) composition as defined herein.

[0691] III.4. Dystroglycans

[0692] Dystroglycan is a protein that in humans is encoded by the DAG1 gene. Dystroglycan is one of the dystrophin-associated glycoproteins, which is encoded by a 5.5 kb transcript in Homo sapiens on chromosome 3. There are two exons that are separated by a large intron. The spliced exons code for a protein product that is finally cleaved into two non-covalently associated subunits, [alpha] (N-terminal) and [beta] (C-terminal). The dystroglycan complex works as a transmembrane linkage between the extracellular matrix and the cytoskeleton. [alpha]-dystroglycan is extracellular and binds to merosin [alpha]-2 laminin in the basement membrane, while [beta]-dystroglycan is a transmembrane protein and binds to dystrophin, which is a large rod-like cytoskeletal protein. Dystrophin binds to intracellular actin fibers. In this way, the dystroglycan complex, which links the extracellular matrix to the intracellular actin fibers, is thought to provide structural integrity in muscle tissues.

[0693] In the present disclosure, the pharmaceutical association, combination or (therapeutic, dermatologic, ophthalmologic, diagnostic, etc.) composition defined herein is thus suitable for treating a neoplastic cell or a neoplastic disease (i) by activating one or more growth factor receptors and (ii) by, simultaneously or non-simultaneously, modulating or regulating the adhesion of that cell to its ECM microenvironment by (partially or completely) deactivating or inhibiting at least one dystroglycan expressed on the cell membrane of said neoplastic cell. In certain embodiments, and without wishing to be bound to any specific theory, the deactivation or inhibition of a dystroglycan may be the result of, for example, dystroglycan's inactivation and/or dystroglycan's gene expression inhibition.

[0694] In certain embodiments, the adhesion protein inhibitor as defined herein comprises (or is) an dystroglycan deactivator or inhibitor which binds to/interacts with at least one dystroglycan and/or to at least one dystroglycan dimer. In one example, said dystroglycan deactivator or inhibitor is a receptor competitive antagonist. In one example, said dystroglycan deactivator or inhibitor is a receptor non-competitive antagonist. In one example, said dystroglycan deactivator or inhibitor is a receptor uncompetitive antagonist. In one example, said dystroglycan deactivator or inhibitor is a receptor silent antagonist. In one example, said dystroglycan deactivator or inhibitor is a receptor partial agonist. In one example, said dystroglycan deactivator or inhibitor is a receptor inverse agonist.

[0695] In one aspect, the present disclosure thus provides a pharmaceutical association or combination or (therapeutic, dermatologic, ophthalmologic, diagnostic, etc.) composition as defined herein comprising at least one GFR-binding compound as defined herein and at least one inhibitor of dystroglycan engagement.

[0696] In one aspect, the present disclosure thus provides a pharmaceutical association or combination or (therapeutic, dermatologic, ophthalmologic, diagnostic, etc.) composition defined herein comprising at least one GFR-binding compound as defined herein and at least one dystroglycan antibody.

[0697] In certain embodiments, the adhesion protein inhibitor as defined herein comprises (or is) a dystroglycan deactivator or inhibitor which inhibits or down-regulates the gene or protein expression of at least one dystroglycan by e.g. alteration of the chromatin structure (e.g. through histone modifications), regulation of gene transcription (e.g. by acting on specificity factors, repressors, general transcription factors, activators, enhancers and/or silencers), post-transcriptional regulation, and/or regulation of translation.

[0698] In one aspect, the present disclosure thus provides a pharmaceutical association or combination or (therapeutic, dermatologic, ophthalmologic, diagnostic, etc.) composition defined herein comprising at least one GFR-binding compound as defined herein and at least one small-interfering RNA (si-RNA) which interferes with or inhibit the gene or protein expression of at least one dystroglycan.

[0699] Dystroglycans expressed on the cell membrane of neoplastic cells may be identified using various methods. However, for the avoidance of doubts and for the purpose of the present disclosure, identification of such dystroglycan(s) is performed using e.g. RT-PCR or western blot. Because, the type of dystroglycans expressed on the cell membrane of a given cell (e.g. a neoplastic cell) may differ from the dystroglycans expressed in the cell membrane of another (neoplastic) cell, prior identification of the dystroglycans expressed on the cell membrane of a cell to be treated using a method such as RT-PCR, allows for a more tailored, personalised and/or efficient treatment to be provided.

[0700] In certain embodiments, the modulation or regulation of a neoplastic cell adhesion thus comprises (or is exclusively constituted of, or exclusively consists of) the inhibition, deactivation or down-regulation of the gene or protein expression of one or more identified dystroglycans expressed by the neoplastic cell to be treated using, for example, conventional techniques known in the art such as gene silencing using small-interfering RNAs, microRNAs, or shRNAs, dystroglycan extracellular antibodies and/or dystroglycan antagonists. The identification of said specific one or more dystroglycans may be carried for each specific neoplastic cell using conventional methods in the art such as the one described herein.

[0701] Various methods known in the art may be used to qualify and/or quantify the degree of deactivation or inhibitory activity of a given adhesion protein inhibitor on the gene expression of dystroglycans. However, for the avoidance of doubts and for the purpose of the present disclosure, assessment of dystroglycans gene expression of a given cell by an adhesion protein inhibitor as defined herein is performed using RT-PCR as already defined herein.

[0702] Various methods known in the art may be used to qualify and/or quantify the degree of deactivation or inhibitory activity of a given adhesion protein inhibitor on the protein expression of dystroglycans. However, for the avoidance of doubts and for the purpose of the present disclosure, assessment of dystroglycans protein expression of a given cell by an adhesion protein inhibitor as defined herein is performed using the western blot method as already defined herein.

[0703] Various methods known in the art may be used to qualify and/or quantify the degree of activation or inactivation/inhibition state of dystroglycans. However, for the avoidance of doubts and for the purpose of the present disclosure, assessment of the dystroglycans activation or inactivation state of a given cell by an adhesion protein inhibitor as defined herein is performed using FRET as already defined herein.

[0704] Also provided is a method of treating a neoplastic cell or a neoplastic disease by (partially or completely) deactivating or inhibiting at least one dystroglycan expressed on the cell membrane of said neoplastic cell, comprising administering to a subject in need thereof an effective amount of a pharmaceutical association, combination or (therapeutic, dermatologic, ophthalmologic, diagnostic, etc.) composition as defined herein.

[0705] Also provided is a method of treating a neoplastic cell or a neoplastic disease comprising identifying at least one dystroglycan expressed on the membrane of said neoplastic cell, and (partially or completely) deactivating or inhibiting said at least one dystroglycan by administering to a subject in need thereof an effective amount of a pharmaceutical association, combination or (therapeutic, dermatologic, ophthalmologic, diagnostic, etc.) composition as defined herein.

[0706] As used herein, the terms “inhibition”, “down-regulation”, “deactivation” or “inactivation”, when used in the context of cell adhesion, refers to a diminution or reduction in activity, function, gene expression and/or protein expression of a molecule, protein or gene, observed when a pharmaceutical association, combination or composition of the present disclosure is provided or administered to a cell or to a subject carrying this cell, using one of the methods defined herein, in comparison with the activity, function, gene expression and/or protein expression of a molecule, protein or gene in a neoplastic cell in the absence of such provision or administration, of more than 10%, 11%, 12%, 13%, 14%, 15%, 16%, 17%, 18%, 19%, 20%, 21%, 22%, 23%, 24%, 25%, 26%, 27%, 28%, 29%, 30%, 31%, 32%, 33%, 34%, 35%, 36%, 37%, 38%, 39%, 40%, 41%, 42%, 43%, 44%, 45%, 46%, 47%, 48%, 49%, 50%, 51%, 52%, 53%, 54%, 55%, 56%, 57%, 58%, 59%, 60%, 61%, 62%, 63%, 64%, 65%, 66%, 67%, 68%, 69%, 70%, 71%, 72%, 73%, 74%, 75%, 76%, 77%, 78%, 79%, 80%, 81%, 82%, 83%, 84%, 85%, 86%, 87%, 88%, 89%, 90%, 91%, 92%, 93%, 94%, 95%, 96%, 97%, 98%, or 99%, in particular of more than 20%. In one particular example, said inhibition is more than 30%. In one particular example, said inhibition is more than 40%. In one particular example, said inhibition is more than 50%. In one particular example, said inhibition is more than 60%. In one particular example, said inhibition is more than 70%. In one particular example, said inhibition is more than 80%.

[0707] In certain embodiments, the inhibition of cell adhesion comprises (or is exclusively constituted of, or exclusively consists of) the inhibition, deactivation or down-regulation of the gene or protein expression of one or more integrins, syndecans, selectins, dystroglycans or any combinations thereof.

[0708] In one aspect, the present disclosure also provides a use of an adhesion protein inhibitor as defined herein in the manufacture of a medicament comprising a GFR-binding compound as defined herein, for use in the diagnostic, prevention and/or treatment of a neoplastic disease.

[0709] IV. Pharmaceutical Associations or Combinations

[0710] In one aspect, the present disclosure provides a pharmaceutical association or combination which may be used for converting or recoding, in-vitro, ex-vivo or in-vivo, a neoplastic cell into a non-neoplastic cell comprising at least one GFR-binding compound and at least one adhesion protein inhibitor, both as defined herein. In one example, said adhesion protein inhibitor is an integrin inhibitor inhibiting or preventing the activation of at least one integrin expressed on the surface of said neoplastic cell. In one example, said adhesion protein inhibitor comprises a syndecan inhibitor inhibiting or preventing the activation of at least one syndecan expressed on the surface of said neoplastic cell. In one example, said adhesion protein inhibitor comprises an integrin inhibitor and a syndecan inhibitor inhibiting or preventing the activation of at least one integrin and at least one syndecan expressed on the surface of said neoplastic cell.

[0711] The present pharmaceutical associations or combinations may thus also be used for protecting a subject carrying a neoplastic cell from a neoplastic disease.

[0712] In one aspect, the present disclosure provides a pharmaceutical association or combination for the uses disclosed herein, substantially free from any cell adhesion promoter. As used herein, the term “substantially free”, as applied to a given component such as a cell adhesion promoter, means that the amount of such a component is less than 20%, 15%, 10%, 5%, 1%, 0.5%, 0.1% or less in mole with respect to the mole content of GFR-binding compound unless otherwise indicated, self-evident or contradictory in context.

[0713] In one aspect, the present disclosure provides a pharmaceutical association as defined herein further comprising (another) anti-cancer agent thus forming a pharmaceutical composition of the invention. In one example, said pharmaceutical composition further comprises at least one pharmaceutically acceptable excipient. In one example, said further anti-cancer agent is functionally associated with said GFR-binding compound and/or said adhesion protein inhibitor. Suitable further anti-cancer agents include but are not limited to, agents that inhibit the synthesis of DNA molecule building blocks, agents that directly damage DNA in the cell nucleus, agents that affect the synthesis or breakdown of mitotic spindles, and agents that inhibit kinase proteins by interacting with the kinase active site. Preferred examples of agents that inhibit the synthesis of DNA molecule building blocks include, but are not limited to, methotrexate (Abitrexate®), fluorouracil (Adrucil®), gemcitabine (Gemzar®), arabinosylcytosine (araC), hydroxyurea (Hydrea®), and mercaptopurine (Purinethol®). Preferred examples of agents that directly damage DNA in the cell nucleus include, but are not limited to, carboplatin (Paraplatin® and paraplatin-AQ®), cisplatin (Platinol®) and antibiotics such as daunorubicin (Cerubidine®), doxorubicin (Adriamycin®), and etoposide (VePesid®). Preferred examples of agents that affect the synthesis or breakdown of mitotic spindles include, but are not limited to, miotic disrupters such as Vinblastine (Velban®), Vincristine (Oncovin®) and Pacitaxel (Taxol®). Preferred examples of agents that inhibit kinase proteins include, but are not limited to, Afatinib®, Axitinib®, Bosulif®, Bosutinib®, Cabozantinib®, Caprelsa®, Cometriq®, Crizotinib®, Dasatinib®, Erlotinib®, Gilotrif®, Gleevec®, Ibrutinib®, Iclusig®, Imatinib®, Imbruvica®, Inlyta®, Lapatinib®, Nexavar®, Nilotinib®, Pazopanib®, Ponatinib®, Regorafenib®, Sorafenib®, Sprycel®, Stivarga®, Sunitinib®, Sutent®, Tarceva®, Tasigna®, Tivopath®, Tivozanib®, Tykerb®, Vandetanib®, Votrient®, Xalkori®, Zaltrap®, and ziv-aflibercept®.

[0714] In one example, the L-asparaginase enzyme may also be used as a further agent in combination with the pharmaceutical association or composition as defined herein. L-asparaginase enzyme has been reported e.g. in L-Asparaginase: A Promising Enzyme for Treatment of Acute Lymphoblastic Leukiemia, People's Journal of Scientific Research, Vol. 5(1), January 2012, which is incorporated herein by reference in its entirety, to act by depriving cancer cells (such as leukemia cells) of asparagine thus inducing their death.

[0715] Other anti-cancer agents may also be used such as nitrogen mustards, ethylenimes, alkylsulfonates, triazenes, piperazines, nitrosureas and antibiotics such as anthracyclines, dactinomycin, bleomycin, adriamycin, or mithramycin.

[0716] In one example, said pharmaceutical association or combination comprises one GFR-binding compound. In one example, said pharmaceutical association or combination comprises two or more distinct GFR-binding compounds. In one example, said pharmaceutical association or combination comprises three or more distinct GFR-binding compounds. In one example, said pharmaceutical association or combination comprises four or more distinct GFR-binding compounds.

[0717] In one aspect, the present disclosure provides a process or method for manufacturing a neoplastic disease medicament, said process or method comprising associating or combining an adhesion protein inhibitor with a GFR-binding compound both as defined herein. Said step of associating or combining may be carried out using any suitable method known in the art.

[0718] In one aspect, the present disclosure provides a process or method for manufacturing a neoplastic disease medicament precursor, said process or method comprising providing a GFR-binding compound and/or an adhesion protein inhibitor both as defined herein, wherein providing said adhesion protein inhibitor and/or said GFR-binding compound manufactures said neoplastic disease medicament.

[0719] In certain aspects, said pharmaceutical association or composition substantially down-regulates, reduces, inhibits or suppresses the gene and/or protein expression of at least one of cyclin-D1, cyclin-D2 or cyclin-D3. Because cyclins D1, D2 and D3 regulate the activity of Cyclin-dependent kinases (CDKs) 4 and 6 by forming cyclin-CDK protein complexes including Cyclin D1-CDK4 complex, Cyclin D1-CDK6 complex, Cyclin D2-CDK4 complex, Cyclin D2-CDK6 complex, Cyclin D3-CDK4 complex and Cyclin D3-CDK6 complex, said pharmaceutical association or composition was also observed to substantially reduce, inhibit, suppress or destabilise the formation of any one of such complexes.

[0720] There are many ways to test, measure and represent the inhibitory effect of a given substance on the gene or protein expression of cyclins D, but for the purpose of the present disclosure, and for the avoidance of any doubts, the inhibition values of a given pharmaceutical association or composition as defined herein is a measure of the gene expression of cyclins D as provided by RT-PCR. It is to be understood that the values of the gene expression of cyclins D disclosed herein correspond to the total gene expression of all cyclins D present in the tested cell i.e. D1, D2 and D3 as known at the date of the present disclosure.

[0721] As already stated above, pharmaceutical associations or compositions suitable for implementing embodiments of the present invention reduce the gene expression of cyclins D by at least 20% during at least one part of the G1 phase of the cell cycle as compared to the wild-type expression. The absolute and relative duration of each cell cycle phase (in other words, the cell cycle duration profile) usually varies (some phases such as the Gap phases may “shrink”) amongst healthy cells of different types (e.g. bone cells, skin cells, etc. . . . ) and between healthy cells and neoplastic cells of the same type (e.g. healthy bone cells and neoplastic bone cells). Typical average cell cycle duration is commonly accepted to be about 24 hours. Typically accepted phase durations for a healthy cell are 11 to 14 hours for the G1 phase, 5 to 12 hours for the S phase, 3 to 12 hours for the G2 phase and about 1 hour for the M phase. In neoplastic cells, such as in cancer cells, it is commonly admitted that, although the duration of the S and M phases may generally be conserved, the length of the G1 and G2 phases is generally shortened in order to increase cell division. Cell cycle phase's duration may thus vary significantly from one cell type to another. Consequently, conventionally and for the purpose of facilitating the comparative representation of the inhibition of the gene expression of cyclins D for different cell types, the gene expression is represented as a function of the cell cycle progression (starting from G1 and finishing with M) and not as a direct function of time.

[0722] Active or bioactive principles or ingredients: In the present description and unless otherwise indicated or contradictory in context, the term “(bio)active principle” or “(bio)active ingredient” generally refers to a molecule, compound or substance which is responsible for providing the desired biological effect. Without said active ingredient, the formulation or composition containing it, would not provide the desired biological effect. For example, in certain embodiments, formulation excipients are not considered as active ingredients in the pharmaceutical composition as defined herein.

[0723] In the present disclosure, said GFR-binding compound and adhesion protein inhibitor or antagonist are both active principles/ingredients.

[0724] Neoplastic disease medicament: In the present description and unless otherwise indicated or contradictory in context, the term “neoplastic disease medicament” means a substance, compound, pharmaceutical association, combination, composition or formulation which is suitable for treating or preventing a neoplastic disease in a subject.

[0725] Subject carrying a neoplastic cell: In the present description and unless otherwise indicated or contradictory in context, the term “subject carrying a neoplastic cell” means that at least one cell constitutive of the subject is a neoplastic cell as defined herein.

[0726] In one particular example, said pharmaceutical association or combination comprises at least one GFR-binding compound selected from the group consisting of peptides of SEQ ID NO: 1 to 13498.

[0727] The present disclosure provides a pharmaceutical association or combination comprising a (modified) GFR-binding compound, wherein all of PEP1, PEP3, PEP5, PEP9, PEP11, PEP12, AA¹⁷, pairs and triplets thereof, disclaimers and provisos, are as already defined herein.

[0728] In one example, an adhesion protein inhibitor and a GFR-binding compound are covalently or non-covalently associated or combined using a method comprising, or exclusively consisting of, contacting an adhesion protein inhibitor and a GFR-binding compound under suitable reacting conditions thereby forming a covalent or non-covalent association between said adhesion protein inhibitor and said GFR-binding compound.

[0729] In one example, said pharmaceutical association, combination or composition comprises at least 1 part of said adhesion protein inhibitor for 100 parts of GFR-binding compound. In one example, said pharmaceutical association, combination or composition comprises at least 5 parts of said adhesion protein inhibitor for 100 parts of GFR-binding compound. In one example, said pharmaceutical association, combination or composition comprises at least 10 parts of said adhesion protein inhibitor for 100 parts of GFR-binding compound. In one example, said pharmaceutical association, combination or composition comprises at least 15 parts of said adhesion protein inhibitor for 100 parts of GFR-binding compound. In one example, said pharmaceutical association, combination or composition comprises at least 20 parts of said adhesion protein inhibitor for 100 parts of GFR-binding compound. In one example, said pharmaceutical association, combination or composition comprises at least 25 parts of said adhesion protein inhibitor for 100 parts of GFR-binding compound. In one example, said pharmaceutical association, combination or composition comprises at least 30 parts of said adhesion protein inhibitor for 100 parts of GFR-binding compound. In one example, said pharmaceutical association, combination or composition comprises at least 35 parts of said adhesion protein inhibitor for 100 parts of GFR-binding compound. In one example, said pharmaceutical association, combination or composition comprises at least 40 parts of said adhesion protein inhibitor for 100 parts of GFR-binding compound. In one example, said pharmaceutical association, combination or composition comprises at least 45 parts of said adhesion protein inhibitor for 100 parts of GFR-binding compound. In one example, said pharmaceutical association, combination or composition comprises at least 50 parts of said adhesion protein inhibitor for 100 parts of GFR-binding compound. In one example, said pharmaceutical association, combination or composition comprises at least 55 parts of said adhesion protein inhibitor for 100 parts of GFR-binding compound. In one example, said pharmaceutical association, combination or composition comprises at least 60 parts of said adhesion protein inhibitor for 100 parts of GFR-binding compound. In one example, said pharmaceutical association, combination or composition comprises at least 65 parts of said adhesion protein inhibitor for 100 parts of GFR-binding compound. In one example, said pharmaceutical association, combination or composition comprises at least 70 parts of said adhesion protein inhibitor for 100 parts of GFR-binding compound. In one example, said pharmaceutical association, combination or composition comprises at least 75 parts of said adhesion protein inhibitor for 100 parts of GFR-binding compound. In one example, said pharmaceutical association, combination or composition comprises at least 80 parts of said adhesion protein inhibitor for 100 parts of GFR-binding compound. In one example, said pharmaceutical association, combination or composition comprises at least 85 parts of said adhesion protein inhibitor for 100 parts of GFR-binding compound. In one example, said pharmaceutical association, combination or composition comprises at least 90 parts of said adhesion protein inhibitor for 100 parts of GFR-binding compound. In one example, said pharmaceutical association, combination or composition comprises at least 95 parts of said adhesion protein inhibitor for 100 parts of GFR-binding compound. In one example, said pharmaceutical association, combination or composition comprises at least 100 parts of said adhesion protein inhibitor for 100 parts of GFR-binding compound.

[0730] V. Polynucleotides

[0731] The extracellular biological action of the herein-defined pharmaceutical association or combination may also be conveyed via expression, by a cell, of the appropriate polynucleotide sequence engineered to encode a particular GFR-binding peptide of interest and/or a particular adhesion protein inhibitor or antagonist of interest. One may thus inject or administer, to a mammal subject, at least one GFR-binding-peptide-encoding polynucleotide or at least one adhesion protein inhibitor- or antagonist-encoding polynucleotide (such as a messenger RNA), wherein said polynucleotide would enable the intracellular production of the encoded GFR-binding peptide or adhesion protein inhibitor or antagonist, which may, once released outside the host cell, exert its extracellular action on the host cell and/or on neighbouring cells and/or distant cells in combination with its complementary extracellular biologically active partner (i.e. a GFR-binding-peptide or an adhesion protein inhibitor or antagonist, as the case may be). In other words, GFR-binding peptides or adhesion protein inhibitors or antagonists may be produced ex-vivo (e.g. using a peptide synthesizer or recombinantly produced) or in-vivo (e.g. via cell expression of encoding polynucleotides), and in all cases have an extracellular combined biological action of (i) activation of growth factor receptors and (ii) inhibition, deactivation, or disengagement action of at least one adhesion protein, to induce cell conversion or recoding of a neoplastic cell into a non-neoplastic cell.

[0732] Alternatively, one may also inject or administer, to a mammal subject, at least one GFR-binding-peptide-encoding polynucleotide and at least one adhesion protein inhibitor- or antagonist-encoding polynucleotide (such as a messenger RNA), wherein said polynucleotides would enable the intracellular production of both, the encoded GFR-binding peptide and the adhesion protein inhibitor or antagonist, which may, once released outside the host cell, exert their combined extracellular action on the host cell and/or on neighbouring cells and/or distant cells. In other words, GFR-binding peptides and adhesion protein inhibitors or antagonists may all be produced ex-vivo (e.g. using a peptide synthesizer or recombinantly produced) or in-vivo (e.g. via cell expression of encoding polynucleotides), and in all cases have an extracellular combined biological action of (i) activation of growth factor receptors and (ii) inhibition, deactivation, or disengagement action of at least one adhesion protein, to induce cell conversion or recoding of a neoplastic cell into a non-neoplastic cell.

[0733] Thus, in one aspect, the present disclosure provides a pharmaceutical composition comprising at least one polynucleotide encoding a GFR-binding peptide as disclosed herein and at least one polypeptide encoding an adhesion protein inhibitor or antagonist.

[0734] Thus, in one aspect, the present disclosure also provides a pharmaceutical composition comprising at least one polynucleotide encoding a GFR-binding peptide as disclosed herein and at least one polypeptide encoding an adhesion protein inhibitor or antagonist having at least one, more than one, or all of, the features described herein with respect to the pharmaceutical association or combination comprising at least one GFR-binding peptide and at least one adhesion protein inhibitor or antagonist.

[0735] In one particular example, said polynucleotide is a messenger RNA or a primary construct thereof. Said messenger RNA may additionally have a 5′ cap structure chosen from the group consisting of m⁷G(5′)ppp (5′)A,G(5′)ppp(5′)A and G(5′)ppp(5′)G. In one example, the messenger RNA additionally has a poly-A tail of from about 10 to 200 adenosine nucleotides. In one example, the messenger RNA additionally has a poly-C tail of from about 10 to 200 cytosine nucleotides. In one example, the messenger RNA additionally codes a tag for purification chosen from the group consisting of a hexahistidine tag (HIS tag, polyhistidine tag), a streptavidin tag (Strep tag), an SBP tag (streptavidin-binding tag) or a GST (glutathione S-transferase) tag, or codes for a tag for purification via an antibody epitope chosen from the group consisting of antibody-binding tags, a Myc tag, a Swal 1 epitope, a FLAG tag or an HA tag. In one example, the messenger RNA additionally codes a signal peptide and/or a localization sequence, in particular a secretion sequence. In one example, said polynucleotide is a complementary DNA of said messenger RNA or a primary construct thereof.

[0736] In one aspect, the present disclosure also provides a vector comprising a polynucleotide as defined in the present disclosure.

[0737] In one aspect, the present disclosure also provides a cultured cell (or transfected cell) comprising a vector as defined in the present disclosure.

[0738] In one aspect, the present disclosure also provides a method of expressing a peptide of interest, variant or analog thereof, in a mammalian cell, said method comprising: (i) providing an mRNA as defined in the present disclosure; and (ii) introducing said mRNA to a mammalian cell under conditions that permit the expression of the peptide of interest by the mammalian cell.

[0739] In one aspect, the present disclosure also provides a method of expressing a pharmaceutical association or combination of interest, in a mammalian cell, said method comprising: (i) providing mRNAs for every components of a pharmaceutical association or combination as defined in the present disclosure; and (ii) introducing said mRNAs to a mammalian cell under conditions that permit the expression of all the components of the pharmaceutical association or combination by the mammalian cell.

[0740] In one aspect, the present disclosure also provides a pharmaceutical composition comprising mRNA molecules as disclosed herein for use in a medical treatment or prophylactic method. In one example, said medical treatment method is a therapeutic, surgical, or diagnostic method. In one particular example, said method is a method for converting or recoding a neoplastic cell into a non-neoplastic cell as defined in the present disclosure. In one particular example, said method is a method for protecting from cancer as disclosed herein.

[0741] In one aspect, the present disclosure also provides a use of mRNA molecules as defined herein, for the preparation of a pharmaceutical composition for the treatment or prevention of a neoplastic disease as defined herein.

[0742] In one aspect, the present disclosure also provides a medical composition comprising one or more polynucleotide(s), one or more vector(s), or one or more transfected cell(s), all as defined in the present disclosure, and a medically acceptable excipient or carrier.

[0743] Expression: As used herein, “expression” of a nucleic acid sequence refers to one or more of the following events: (1) production of an RNA template from a DNA sequence (e.g., by transcription); (2) processing of an RNA transcript (e.g., by splicing, editing, 5′ cap formation, and/or 3′ end processing); (3) translation of an RNA into a polypeptide or protein; and (4) post-translational modification of a polypeptide or protein.

[0744] mRNA: As used herein, the term “mRNA” refers to messenger RNA. Traditionally, the basic components of an mRNA molecule include at least a coding region, a 5′UTR, a 3′UTR, a 5′cap and a poly-A tail. Whereas the 5′UTR, 3′UTR, 5′cap and the poly-A tail are usually required to improve e.g. stability, translation and/or recognition by the ribosome, it is the coding region which comprises the sequence encoding the protein(s), polypeptide(s), or peptide(s) of (therapeutic) interest. Therefore, when the mRNA molecule as disclosed herein is conventionally described with reference to its coding region, any mRNA molecule also comprising at least one of a 5′UTR, a 3′UTR, a 5′cap or a poly-A tail forms an integral part of the present disclosure.

[0745] Coding region: As used herein, the term “coding region” or “coding sequence” refers to a portion of a polynucleotide that codes for a peptide or peptides of interest.

[0746] Primary RNA construct or transcript: As used herein, unless indicated otherwise or contradictory in context, the term “Primary RNA construct” or “Primary RNA transcript” refers to any precursor RNA molecule from a mature and functional (i.e. translatable) RNA molecule may be obtained. For instance, a precursor messenger RNA (pre-mRNA) is a type of primary transcript that becomes a messenger RNA (mRNA) after processing. Newly synthesized primary transcripts are modified in several ways to yield their mature form before they can be translated into a protein of interest. Such modifications include, but are not limited to, excision of introns, splicing of exons, addition of 5′cap and poly-A tail. Therefore, when reference is made to an RNA molecule, it shall be understood that it aims to cover all RNA molecules including, but not limited to, primary RNA transcripts or constructs at any stage of the modification process leading to a mature and functional RNA molecule e.g. with or without introns, exons, 5′cap, poly-A tail and/or any other conventional modifications, insofar as the RNA molecule contains a coding region or a precursor thereof allowing for a peptide of interest encoded by said coding region or precursor thereof to be expressed.

[0747] 5′ Capping: As used herein, unless indicated otherwise or contradictory in context, the term “5′ Capping” ou “5′ Cap” refers to a 5′ cap structure of an mRNA that is involved in nuclear export, increasing mRNA stability and binds the mRNA Cap Binding Protein (CBP), which is responsible for mRNA stability in the cell and translation competency through the association of CBP with poly(A) binding protein to form the mature cyclic mRNA species. The cap further assists the removal of 5′ proximal introns removal during mRNA splicing. Endogenous mRNA molecules may be 5′-end capped generating a 5′-ppp-5′-triphosphate linkage between a terminal guanosine cap residue and the 5′-terminal transcribed sense nucleotide of the mRNA molecule. This 5′-guanylate cap may then be methylated to generate an N7-methyl-guanylate residue.

[0748] Poly-A tails: During RNA processing, a long chain of adenine nucleotides (poly-A tail) may be added to a polynucleotide such as an mRNA molecules in order to increase stability. Immediately after transcription, the 3′ end of the transcript may be cleaved to free a 3′ hydroxyl. Then poly-A polymerase adds a chain of adenine nucleotides to the RNA. The process, called polyadenylation, adds a poly-A tail that can be between, for example, approximately 100 and 250 residues long.

[0749] Untranslated regions: As used herein, the term “Untranslated regions” or UTRs of a gene refers to regions that are transcribed but not translated. The 5′UTR starts at the transcription start site and continues to the start codon but does not include the start codon; whereas, the 3′UTR starts immediately following the stop codon and continues until the transcriptional termination signal. The regulatory features of a UTR can be incorporated into the polynucleotides, primary constructs and/or mRNA of the present disclosure to enhance the stability of the molecule.

[0750] 3′UTR: As used herein, unless indicated otherwise or contradictory in context, the term “3′UTR” or “three prime untranslated region” refers to the section of messenger RNA that immediately follows the translation termination codon. The 3′-UTR often contains regulatory regions that post-transcriptionally influence gene expression.

[0751] 5′UTR: As used herein, unless indicated otherwise or contradictory in context, the term “5′UTR” or “five prime untranslated region” refers to the section of mRNA that starts at the transcription start site and continues to the start codon but does not include the start codon. There is growing body of evidence about the regulatory roles played by the UTRs in terms of stability of the nucleic acid molecule and translation. Natural 5′UTRs bear features which play roles in for translation initiation. 5′UTR also have been known to form secondary structures which are involved in elongation factor binding.

[0752] Complementary DNA: As used herein, the term “complementary DNA” or “cDNA” refers to a DNA molecule containing an eukaryote gene which has been tailored or engineered to be expressed in a prokaryote host cell. cDNA is also called “intron-free” DNA as it lacks the gene regions encoding introns, its transcription yielding an intron-free mRNA molecule.

[0753] Vector: As used herein, unless indicated otherwise or contradictory in context, the term “vector” is used in its most general meaning and refers to any intermediary vehicle for a nucleic acid which enables said nucleic acid, for example, to be introduced into prokaryotic and/or eukaryotic cells and, where appropriate, to be integrated into a genome. Vectors of this kind are preferably replicated and/or expressed in the cells. Vectors may comprise plasmids, phagemids, bacteriophages or viral genomes.

[0754] Plasmid: As used herein, unless indicated otherwise or contradictory in context, the term “plasmid” refers to a double-stranded (which may be circular) DNA sequence that is capable of automatically replicating in a host cell.

[0755] In one aspect, the present disclosure provides methods and uses for converting or recoding a neoplastic cell into a non-neoplastic cell and protecting a patient from neoplastic diseases, conditions, disorders or pathologies, using a medical combination of (i) a polynucleotide encoding at least one peptide, variant or analog thereof, having growth factor receptor-binding and activating capability or capabilities, as defined herein, a vector comprising such a polynucleotide, or a transfected cell comprising such a vector, and (ii) at least one adhesion protein inhibitor or antagonist, as defined herein.

[0756] In one aspect, the present disclosure provides methods and uses for converting or recoding a neoplastic cell into a non-neoplastic cell and protecting a patient from neoplastic diseases, conditions, disorders or pathologies, using a medical combination of (i) a polynucleotide encoding at least one peptide, variant or analog thereof, having growth factor receptor-binding and activating capability or capabilities, as defined herein, a vector comprising such a polynucleotide, or a transfected cell comprising such a vector, and (ii) a polynucleotide encoding at least one adhesion protein inhibitor or antagonist, as defined herein, a vector comprising such a polynucleotide, or a transfected cell comprising such a vector.

[0757] VI. Pharmaceutical Compositions

[0758] In one aspect, the present disclosure provides a composition such as a pharmaceutical, prophylactic, surgical, diagnostic, or imaging composition (hereinafter shorten as pharmaceutical or medical composition) for the uses and methods already disclosed herein comprising at least one pharmaceutical association or combination as defined herein and further comprising at least one pharmaceutically acceptable excipient, carriers and/or vehicles.

[0759] Formulations of the pharmaceutical compositions described herein may be prepared by any method known or hereafter developed in the art of pharmacology. Generally, such methods of preparation include the step of bringing the active ingredient(s) into association with an excipient and/or one or more other accessory ingredients, and then, if necessary and/or desirable, shaping and/or packaging the product into a desired single- or multi-dose unit.

[0760] For example, in certain embodiments, a pharmaceutical composition as defined herein may contain between 0.01% and 100% by weight (over the total weight of the pharmaceutical composition) of a GFR-binding compound or a pharmaceutical association or combination, both as defined herein, as a pharmaceutically effective amount. The pharmaceutical composition particularly comprises between 0.01% and 95%, between 0.01% and 90%, between 0.01% and 85%, between 0.01% and 80%, between 0.01% and 75%, between 0.01% and 70%, between 0.01% and 65%, between 0.01% and 60%, between 0.01% and 55%, between 0.01% and 50%, between 0.01% and 45%, between 0.01% and 40%, between 0.01% and 35%, between 0.01% and 30%, between 0.01% and 25%, between 0.01% and 20%, between 0.01% and 15%, between 0.01% and 10%, between 0.01% and 5%, between 0.1% and 100%, between 0.1% and 95%, between 0.1% and 90%, between 0.1% and 85%, between 0.1% and 80%, between 0.1% and 75%, between 0.1% and 70%, between 0.1% and 65%, between 0.1% and 60%, between 0.1% and 55%, between 0.1% and 50%, between 0.1% and 45%, between 0.1% and 40%, between 0.1% and 35%, between 0.1% and 30%, between 0.1% and 25%, between 0.1% and 20%, between 0.1% and 15%, between 0.1% and 10%, and between 0.1% and 5% by weight (over the total weight of the pharmaceutical composition) of any one of a GFR-binding compound or an adhesion protein inhibitor or both.

[0761] Generally, the GFR-binding compounds or pharmaceutical associations or combinations as defined herein may thus be administered as such or as part of a formulation in association with one or more pharmaceutically acceptable excipients, carriers and/or vehicles so as to form what is generally referred to as a pharmaceutical composition or pharmaceutical formulation.

[0762] Pharmaceutical effective amount: As used herein, unless indicated otherwise or contradictory in context, the term “pharmaceutical effective amount” or “therapeutically effective amount” refers to an amount of an agent to be delivered (e.g., nucleic acid, protein, peptide, drug, therapeutic agent, diagnostic agent, prophylactic agent, etc.) that is sufficient, when administered to a subject suffering from or susceptible to an infection, disease, disorder, condition and/or pathology, to produce/provide a therapeutically effective outcome. Thus, a “pharmaceutical effective amount” depends upon the context in which it is being applied. A pharmaceutical effective amount of a composition is provided based, at least in part, on the target tissue, target cell type, means of administration, physical characteristics of the pharmaceutical association or composition (e.g., size, 3D shape, etc.), and other determinants. For example, in certain embodiments, in the context of administering an agent that treats cancer, a pharmaceutical effective amount of an agent is, for example, in certain embodiments, an amount sufficient to achieve treatment, as defined herein, of cancer, as compared to the response obtained without administration of the agent. For example, in certain embodiments, a therapeutically effective amount as used herein is any of the herein disclosed weight or molar amounts, ratios or ranges of the GFR-binding compound, the adhesion protein inhibitor or the association/combination thereof.

[0763] Therapeutically effective outcome: As used herein, unless indicated otherwise or contradictory in context, the term “therapeutically effective outcome” refers to an outcome that is sufficient in a subject suffering from or susceptible to an infection, disease, disorder, condition and/or pathology, to treat, improve symptoms of, diagnose, prevent, and/or delay the onset of the infection, disease, disorder, condition and/or pathology.

[0764] Therapeutic Agent: As used herein, unless indicated otherwise or contradictory in context, the term “therapeutic agent” refers to any agent that, when administered to a subject/patient/individual, has a therapeutic, diagnostic, and/or prophylactic effect and/or elicits a desired biological and/or pharmacological effect.

[0765] Pharmaceutically acceptable: As used herein, unless indicated otherwise or contradictory in context, the term “pharmaceutically acceptable” refers to those compounds, materials, compositions, and/or dosage forms which are, within the ambit of sound medical judgment, suitable for use in contact with the tissues of human beings and animals without excessive toxicity, irritation, allergic response, or other problem or complication, commensurate with a reasonable benefit/risk ratio.

[0766] Pharmaceutically acceptable excipients: As used herein, unless indicated otherwise or contradictory in context, the term “pharmaceutically acceptable excipient” refers to any ingredient other than the compounds described herein (i.e. GFR-binding compounds, adhesion protein inhibitor as defined herein or any further active principles such as additional anti-cancer agents or anti-inflammatory agents) and satisfying to the herein defined definition of pharmaceutically acceptable for a patient. Excipients may include, for example: inert diluents, dispersing and/or granulating agents, surface active agents and/or emulsifiers, disintegrating agents, binding agents, preservatives, buffering agents, lubricating agents, oils, printing inks, sweeteners, and/or waters of hydration. The choice of excipient(s) will largely depend on factors such as the particular mode of administration, the effect of the excipient(s) on solubility and stability, and the nature of the dosage form. In one embodiment, the pharmaceutically acceptable excipient is not a naturally occurring excipient.

[0767] Diluents: As used herein, unless indicated otherwise or contradictory in context, diluents include, but are not limited to, calcium carbonate, sodium carbonate, calcium phosphate, dicalcium phosphate, calcium sulfate, calcium hydrogen phosphate, sodium phosphate lactose, sucrose, cellulose, microcrystalline cellulose, kaolin, mannitol, sorbitol, inositol, sodium chloride, dry starch, powdered sugar and/or any combinations thereof.

[0768] Buffering agents: As used herein, unless indicated otherwise or contradictory in context, buffering agents include, but are not limited to, citrate buffer solutions, acetate buffer solutions, phosphate buffer solutions, ammonium chloride, potassium acetate, potassium chloride, monobasic potassium phosphate, calcium carbonate, calcium chloride, calcium citrate, calcium gluconate, calcium lactate, propanoic acid, calcium levulinate, pentanoic acid, phosphoric acid, calcium hydroxide phosphate, sodium acetate, sodium bicarbonate, sodium chloride, sodium citrate, sodium lactate, magnesium hydroxide, aluminum hydroxide, alginic acid, pyrogen-free water, isotonic saline, Ringer's solution, ethyl alcohol and any combinations thereof.

[0769] Granulating and/or dispersing agents: As used herein, unless indicated otherwise or contradictory in context, granulating and/or dispersing agents include, but are not limited to, potato starch, corn starch, tapioca starch, sodium starch glycolate, clays, alginic acid, guar gum, citrus pulp, agar, bentonite, cellulose and wood products, natural sponge, cation-exchange resins, calcium carbonate, silicates, sodium carbonate, cross-linked poly(vinyl-pyrrolidone), sodium carboxymethyl starch, carboxymethyl cellulose, cross-linked sodium carboxymethyl cellulose, methylcellulose, pregelatinized starch, microcrystalline starch, water insoluble starch, calcium carboxymethyl cellulose, magnesium aluminum silicate, sodium lauryl sulfate, quaternary ammonium compounds and/or any combinations thereof.

[0770] Surface active agents and/or emulsifiers: As used herein, unless indicated otherwise or contradictory in context, surface active agents and/or emulsifiers include, but are not limited to, colloidal clays (such as aluminum silicates and magnesium aluminum silicates), natural emulsifiers (such as acacia, agar, sodium alginate, cholesterol, xanthan, pectin, gelatin, egg yolk, casein, cholesterol, wax, and lecithin), long chain amino acid derivatives, high molecular weight alcohols (such as stearyl, cetyl and oleyl alcohols, triacetin monostearate, ethylene glycol distearate and glyceryl monostearate), carbomers (such as carboxy polymethylene, polyacrylic acid, acrylic acid polymer, and carboxyvinyl polymer), diethylene glycol monolaurate, triethanolamine oleate, sodium oleate, potassium oleate, ethyl oleate, oleic acid, ethyl laurate, sodium lauryl sulfate, cetrimonium bromide, cetylpyridinium chloride, benzalkonium chloride, docusate sodium, carrageenan, cellulosic derivatives (such as carboxymethylcellulose sodium, hydroxymethyl cellulose, hydroxypropyl methylcellulose and methylcellulose), sorbitan fatty acid esters (such as polyoxyethylene sorbitan monolaurate, polyoxyethylene sorbitan, polyoxyethylene sorbitan monooleate, sorbitan monopalmitate and glyceryl monooleate), polyoxyethylene esters, sucrose fatty acid esters, polyethylene glycol fatty acid esters, polyoxyethylene ethers, poly(vinyl-pyrrolidone), and any combinations thereof.

[0771] Binding agents: As used herein, unless indicated otherwise or contradictory in context, binding agents include, but are not limited to, natural and synthetic gums (such as acacia, sodium alginate, carboxymethylcellulose, methylcellulose, ethylcellulose, hydroxyethylcellulose, hydroxypropyl cellulose, hydroxypropyl methylcellulose, microcrystalline cellulose, cellulose acetate and poly(vinyl-pyrrolidone), gelatin, starch, sugars (such as sucrose, dextrose, glucose, dextrin, lactose, and mannitol), alignates, magnesium aluminum silicates, polyethylene glycol, polyethylene oxide, inorganic calcium salts, water, alcohol, silicic acid, waxes, and any combinations thereof.

[0772] Preservatives: As used herein, unless indicated otherwise or contradictory in context, preservatives include, but are not limited to, antioxidants, chelating agents, antifungal preservatives, antimicrobial preservatives, acidic preservatives, and alcohol preservatives.

[0773] Antioxidants: As used herein, unless indicated otherwise or contradictory in context, antioxidants include, but are not limited to, alpha tocopherol, ascorbic acid, acorbyl palmitate, butylated hydroxyanisole, propionic acid, potassium metabisulfite, propyl gallate, sodium metabisulfite, sodium ascorbate, and sodium sulfite.

[0774] Chelating agents: As used herein, unless indicated otherwise or contradictory in context, chelating agents include ethylenediaminetetraacetic acid (EDTA), fumaric acid, malic acid, phosphoric acid, citric acid monohydrate and tartaric acid.

[0775] Antimicrobial preservatives: As used herein, unless indicated otherwise or contradictory in context, antimicrobial preservatives include, but are not limited to, benzalkonium chloride, benzethonium chloride, chlorhexidine, chlorobutanol, chlorocresol, chloroxylenol, benzyl alcohol, bronopol, cetylpyridinium chloride, cresol, ethyl alcohol, glycerin, hexetidine, imidurea, phenoxyethanol, phenylmercuric nitrate, phenylethyl alcohol, phenol, and propylene glycol.

[0776] Antifungal preservatives: As used herein, unless indicated otherwise or contradictory in context, antifungal preservatives include, but are not limited to, benzoic acid, hydroxybenzoic acid, butyl paraben, methyl paraben, ethyl paraben, propyl paraben, potassium benzoate, sodium propionate, potassium sorbate, and/or sorbic acid.

[0777] Alcohol preservatives: As used herein, unless indicated otherwise or contradictory in context, alcohol preservatives include, but are not limited to, phenol, phenolic compounds, bisphenol, ethanol, polyethylene glycol, chlorobutanol and hydroxybenzoate.

[0778] Acidic preservatives: As used herein, unless indicated otherwise or contradictory in context, acidic preservatives include, but are not limited to, vitamin A, vitamin C, vitamin E, beta-carotene, acetic acid, citric acid, dehydroacetic acid, and sorbic acid.

[0779] Lubricating agents: As used herein, unless indicated otherwise or contradictory in context, lubricating agents include, but are not limited to, magnesium stearate, calcium stearate, stearic acid, sodium benzoate, sodium acetate, sodium chloride, silica, talc, malt, glyceryl behanate, hydrogenated vegetable oils, polyethylene glycol, magnesium lauryl sulphate and any combinations thereof.

[0780] Sweeteners: As used herein, unless indicated otherwise or contradictory in context, sweeteners include, but are not limited to, any natural or synthetic sugar substitutes. Natural sugar substitutes include, but are not limited to, brazzein, curculin, erythritol, glycyrrhizin, glycerol, hydrogenated starch hydrolysates, inulin, isomalt, lactitol, mogroside mix, mabinlin, maltitol, malto-oligosaccharide, mannitol, miraculin, monatin, monellin, osladin, pentadin, sorbitol, stevia, tagatose, thaumatin, and xylitol. Synthetic sugar substitutes include, but are not limited to, acesulfame potassium, advantame, alitame, aspartame, salt of aspartame-acesulfame, sodium cyclamate, dulcin, glucin, neohesperidin dihydrochalcone, neotame, P-4000, saccharin, Sucralose.

[0781] Exemplary excipients include, but are not limited to: butylated hydroxytoluene (BHT), calcium carbonate, calcium phosphate (dibasic), calcium stearate, croscarmellose, crosslinked polyvinyl pyrrolidone, citric acid, crospovidone, cysteine, ethylcellulose, gelatin, hydroxypropyl cellulose, hydroxypropyl methylcellulose, lactose, magnesium stearate, maltitol, mannitol, methionine, methylcellulose, methyl paraben, microcrystalline cellulose, polyethylene glycol, polyvinyl pyrrolidone, povidone, pregelatinized starch, propyl paraben, retinyl palmitate, shellac, silicon dioxide, sodium carboxymethyl cellulose, sodium citrate, sodium starch glycolate, sorbitol, starch, stearic acid, sucrose, talc, titanium dioxide, vitamin A, vitamin E, vitamin C, and xylitol. Suitable excipients for use in the present invention also include, but are not limited to, water, phosphate buffered saline (PBS), Ringer's solution, dextrose solution, serum-containing solutions, Hank's solution, other aqueous physiologically balanced solutions, oils, esters and glycols. Aqueous excipients can contain suitable auxiliary substances required to approximate the physiological conditions of the recipient, for example, in certain embodiments, by enhancing chemical stability and isotonicity.

[0782] Pharmaceutically/medically acceptable carriers: As used herein, unless indicated otherwise or contradictory in context, the term “pharmaceutically acceptable carriers”, “medically acceptable carrier” or “carriers” refers to pharmaceutically acceptable excipients and/or delivery vehicles suitable for delivering a pharmaceutical or therapeutic composition useful in a therapeutic method and uses of the present invention to a suitable in-vivo or ex-vivo site. Preferred pharmaceutically acceptable carriers are capable of maintaining a composition containing an active combination or association of a GFR-binding compound and an adhesion protein inhibitor as defined herein, in a form that, upon arrival of the combination to a target cell, site or tissue, the active combination is capable of performing one or more biological functions thereof the protein at the cell or tissue site. One type of pharmaceutically acceptable carrier includes a controlled release formulation that is capable of slowly releasing a composition or combination into an animal. In one example, a controlled release formulation comprises an active combination or association as defined herein in a controlled release vehicle. Suitable controlled release vehicles include, but are not limited to, microparticles, biocompatible polymers, other polymeric matrices, capsules, microcapsules, osmotic pumps, bolus preparations, diffusion devices, liposomes, lipospheres, and transdermal delivery systems. Such suitable controlled release vehicle may be combined with at least one targeting moiety. In one embodiment, the pharmaceutically acceptable carrier is not a naturally occurring carrier. When polynucleotides such as mRNAs are used, it is preferable to use pharmaceutically acceptable carriers that would also effect/help transfection into the cells. Calcium Phosphate Transfection, Cationic Lipid Transfection, DEAE-Dextran Transfection, Electroporation, or viral transfection, are examples of transfection methods using pharmaceutically acceptable carriers that may also be used for implementing certain embodiments of the present disclosure.

[0783] Targeting Moieties: In one example, the pharmaceutical association or combination disclosed herein includes at least one binding partner which functions to target the cell to a specific tissue space or to interact with a specific moiety, either in-vivo, ex-vivo or in-vitro. Suitable binding partners include antibodies and functional fragments thereof, scaffold proteins, or peptides.

[0784] In one example, said excipients, carriers or vehicles are compatible with the GFR-binding compounds or pharmaceutical association or combinations defined herein so that they do not disrupt, tamper, modify, de-organise, de-combine or de-associate said the GFR-binding compounds or pharmaceutical association or combinations. In contrast, said excipients, carriers or vehicles preserves, maintains or reinforces the stability of the GFR-binding compounds or pharmaceutical association or combinations so as to preserve their biological activity.

[0785] In one example, the present pharmaceutical compositions also include pharmaceutically acceptable salts and/or solvates and/or prodrugs and/or isotopically-labelled derivatives of the substances and compounds described herein such as the GFR-binding compounds or any other active principles.

[0786] Pharmaceutically acceptable salts: As used herein, unless indicated otherwise or contradictory in context, the term “pharmaceutically acceptable salts” refers to derivatives of the disclosed substances and compounds wherein the parent substance or compound is modified by converting an existing acid or base moiety to its salt form (e.g., by reacting the free base group with a suitable organic acid). The degree of ionization in the salt may vary from completely ionized to almost non-ionized. Examples of pharmaceutically acceptable salts include, but are not limited to, mineral or organic acid salts of basic residues such as amines; alkali or organic salts of acidic residues such as carboxylic acids; and the like. Representative acid addition salts include acetate, adipate, alginate, ascorbate, aspartate, benzenesulfonate, benzoate, bisulfate, borate, butyrate, camphorate, camphorsulfonate, citrate, cyclopentanepropionate, digluconate, dodecylsulfate, ethanesulfonate, fumarate, glucoheptonate, glycerophosphate, hemisulfate, heptonate, hexanoate, hydrobromide, hydrochloride, hydroiodide, 2-hydroxy-ethanesulfonate, lactobionate, lactate, laurate, lauryl sulfate, malate, maleate, malonate, methanesulfonate, 2-naphthalenesulfonate, nicotinate, nitrate, oleate, oxalate, palmitate, pamoate, pectinate, persulfate, 3-phenylpropionate, phosphate, picrate, pivalate, propionate, stearate, succinate, sulfate, tartrate, thiocyanate, toluenesulfonate, undecanoate, valerate salts, and the like. Representative alkali or alkaline earth metal salts include sodium, lithium, potassium, calcium, magnesium, and the like, as well as nontoxic ammonium, quaternary ammonium, and amine cations, including, but not limited to ammonium, tetramethylammonium, tetraethylammonium, methylamine, dimethylamine, trimethylamine, triethylamine, ethylamine, and the like. The pharmaceutically acceptable salts of the present disclosure include the conventional non-toxic salts of the parent compound formed, for example, in certain embodiments, from non-toxic inorganic or organic acids. The pharmaceutically acceptable salts of the present disclosure can be synthesized from the parent compound which contains a basic or acidic moiety by conventional chemical methods. Generally, such salts can be prepared by reacting the free acid or base forms of these compounds with a stoichiometric amount of the appropriate base or acid in water or in an organic solvent, or in a mixture of the two; generally, non-aqueous media like ether, ethyl acetate, ethanol, isopropanol, or acetonitrile are preferred. Lists of suitable salts are generally found in Remington's Pharmaceutical Sciences, 17th ed., Mack Publishing Company, Easton, Pa., 1985, p. 1418 and in Pharmaceutical Salts: Properties, Selection, and Use, P. H. Stahl and C. G. Wermuth (eds.), Wiley-VCH, 2008, each of which being incorporated herein by reference in its entirety. In one embodiment, the pharmaceutically acceptable salt is not a naturally occurring salt.

[0787] Pharmaceutically acceptable solvate: As used herein, unless indicated otherwise or contradictory in context, the term “pharmaceutically acceptable solvate,” refers to a compound, substance, association or combination wherein molecules of a suitable solvent are incorporated in the crystal lattice. A suitable solvent is physiologically tolerable at the dosage administered. For example, in certain embodiments, solvates may be prepared by crystallization, recrystallization, or precipitation from a solution that includes organic solvents, water, or a mixture thereof. Examples of suitable solvents are ethanol, water (For example, in certain embodiments, mono-, di-, and tri-hydrates), N-methylpyrrolidinone (NMP), dimethyl sulfoxide (DMSO), dimethylformamide (DMF), [Nu],[Nu]′-dimethylacetamide (DMAC), 1,3-dimethyl-2-imidazolidinone (DMEU), 1,3-dimethyl-3,4,5,6-tetrahydro-2-(1H)-pyrimidinone (DMPU), acetonitrile (ACN), propylene glycol, ethyl acetate, benzyl alcohol, 2-pyrrolidone, benzyl benzoate, and the like. When water is the solvent, the solvate is referred to as a “hydrate”. In one embodiment, the pharmaceutically acceptable solvate is not a naturally occurring solvate.

[0788] Pharmaceutically acceptable isotopically-labelled compounds: In one example, the present invention also includes all pharmaceutically acceptable isotopically-labelled derivatives, which are identical to the compounds, substances, combinations or associations described herein but wherein one or more atoms are replaced by atoms having an atomic mass or mass number different from the atomic mass or mass number usually found in nature. Examples of isotopes that may be incorporated into GFR-binding compound(s) as defined herein include isotopes of hydrogen, carbon, chlorine, fluorine, iodine, nitrogen, oxygen, and sulfur, such as ²H, ³H, ¹¹C, ¹³C, ¹⁴C, ³⁶Cl, ¹⁸F, ¹²³I, ¹³N, ¹⁵N, ¹⁷O, ¹⁸O, and ³⁵S, respectively. It should be understood that compounds, substances, combinations, associations, prodrugs, and pharmaceutical acceptable salts thereof described herein which contain the aforementioned isotopes and/or other isotopes of other atoms are within the scope of the invention. Certain isotopically labeled of the compounds, substances, combinations, associations, prodrugs, and salts thereof such as, for example, in certain embodiments, those incorporating a radioactive isotope such as ³H and ¹⁴C, are useful in drug and/or substrate tissue distribution studies. Tritium, i.e. ³H, and carbon-14, i.e. ¹⁴C, are particularly preferred due to their ease of preparation and detection. Further, substitution with heavier isotopes such as deuterium, i.e. ²H, can afford certain therapeutic advantages resulting from greater metabolic stability, for example, in certain embodiments, increased in vivo half-life or reduced dosage requirements, and hence may be preferred in some circumstances. Isotopically labeled compounds, substances, combinations, associations, prodrugs, and salts thereof can generally be prepared by carrying out the procedures disclosed in the Schemes and/or in the Examples by substituting a readily available non-isotopically labeled reagent for an isotopically labeled reagent.

[0789] Prodrugs: As used herein, unless indicated otherwise or contradictory in context, the term “prodrug” refers to a compound, substance, combination or association that is transformed in vivo to yield a compound, substance, combination or association as defined herein or a pharmaceutically acceptable salt or solvate thereof. The transformation may occur by various mechanisms, such as via hydrolysis in blood. A prodrug of a compound, substance, combination or association defined herein may be formed in a conventional manner with one or more functional groups in the compound, such as an amino, hydroxyl or carboxyl group. For example, in certain embodiments, if a compound defined herein contains a carboxylic acid functional group, a prodrug can comprise: (1) an ester formed by the replacement of a hydrogen of the acid group with a group such as (C1-C6)alkyl or (C6-C10) aryl; (2) an activated ester formed by the replacement of the hydrogen of the acid group with groups such as —(CR²)COOR′, where CR² is a spacer and R can be groups such as H or methyl and R′ can be groups such as (C1-C6)alkyl or (C6-C10) aryl; and/or (3) a carbonate formed by the replacement of the hydrogen of the acid with groups such as CHROCOOR′ where R can be groups such as H or methyl and R′ can be groups such as (C1-C6)alkyl or (C6-C10)aryl. Similarly, if a compound defined herein contains an alcohol functional group, a prodrug can be formed via the replacement of the hydrogen of the alcohol with groups such as (C1-C6)alkanoyloxymethyl or (C1-C6)alkanoyloxyaryl or by forming an ester via condensation with, for example, in certain embodiments, an amino acid. Where a compound defined herein contains a primary or secondary amino group, a prodrug may comprise, for example, in certain embodiments, an amide formed by the replacement of one or both of the hydrogen atoms of the amino group with (C1-C10)alkanoyl or (C6-C10)aroyl. Other prodrugs of amines are well known to those skilled in the art. Alternatively, certain compounds defined herein may themselves act as prodrugs of other compounds defined herein. Discussions regarding prodrugs and their use can be found in, for example, in certain embodiments, “Prodrugs as Novel Delivery Systems,” T. Higuchi and W. Stella, Vol. 14 of the ACS Symposium Series, and Bioreversible Carriers in Drug Design, Pergamon Press, 1987 (ed. E B Roche, American Pharmaceutical Association). Examples of other prodrug types may be found in the aforementioned reference which is hereby incorporated by reference.

[0790] In one particular example, alginate may be used as a carrier or matrice for the non-cyclic or cyclic GFR-binding compounds in association with the adhesion-protein-inhibitor, both as defined herein.

[0791] VII. Administration Routes and Procedures

[0792] Compounds, substances, pharmaceutical associations or combinations to be delivered and/or pharmaceutical, dermatological, prophylactic, diagnostic, or imaging compositions or formulations thereof in accordance with the present disclosure may be administered by any route of administration effective for preventing, treating, diagnosing, or imaging a disease, disorder, and/or condition and/or treating or alleviating at least one symptoms thereof.

[0793] Suitable administration protocols include any in-vitro, in-vivo or ex-vivo administration protocol. The preferred types and routes of administration will be apparent to those of skill in the art, depending on the type of condition or disease to be prevented or treated; whether the composition is nucleic acid based, protein based, cell based or combinations or mixtures thereof; and/or the target cell/tissue.

[0794] Cells, tissues or organs can be contacted ex vivo or in vitro with a pharmaceutical association or combination for uses and methods of the invention by any suitable method, including mixing or the use of a delivery vehicle. Effective in vitro or ex vivo culture conditions include, but are not limited to, effective media, bioreactor, temperature, pH and oxygen conditions that permit cell culture. An effective medium refers to any medium in which a given host cell or tissue is typically cultured. Such medium typically comprises an aqueous medium having assimilable carbon, nitrogen and phosphate sources, and appropriate salts, minerals, metals and other nutrients, such as vitamins. Cells can be cultured in conventional fermentation bioreactors, shake flasks, test tubes, microtiter dishes, and petri plates. Culturing can be carried out at a temperature, pH and oxygen content appropriate for a cell or tissue. Such culturing conditions are within the expertise of one of ordinary skill in the art.

[0795] In one aspect, the present disclosure thus also provides a method for converting a neoplastic cell into a non-neoplastic cell, in-vitro or ex-vivo as defined herein, said method comprising the administration to a neoplastic cell of an effective amount of a pharmaceutical association, combination or composition as defined herein.

[0796] Ex-vivo administration: As used herein, unless indicated otherwise or contradictory in context, the term “ex-vivo administration” refers to performing the regulatory step outside of the subject/patient, such as administering a pharmaceutical association, combination or composition as defined herein to a population of cells (e.g., neoplastic cells) removed from a subject/patient for e.g. diagnostic, analysis and/or academic purposes.

[0797] In-vivo administration: In one example, pharmaceutical, prophylactic, diagnostic, or imaging associations, combinations or compositions are administered by one or more of a variety of routes, including oral, intravenous, intramuscular, intra-arterial, intramedullary, rectal, intravaginal, intrathecal, subcutaneous, intraventricular, transdermal, intradermal, intraperitoneal, topical (e.g. by ointments, creams, powders, lotions, gels, and/or drops), buccal, enteral, mucosal, nasal, vitreal, intratumoral, sublingual, by intra-tracheal instillation, bronchial instillation, and/or inhalation, as an oral spray, nasal spray, and/or aerosol, and/or through a portal vein catheter. In one example, pharmaceutical, prophylactic, diagnostic, or imaging associations, combinations or compositions are administered by systemic intravenous injection. In one example, pharmaceutical, prophylactic, diagnostic, or imaging associations, combinations or compositions may be administered in a way which allows them to cross the blood-brain barrier, vascular barrier, or other epithelial barrier. In one most particular example, pharmaceutical, prophylactic, diagnostic, or imaging associations, combinations or compositions may be administered locally by intratumoral administration or near tumor sites. Local administration may be performed e.g. using patches, syringes, or insertion of permeable macroscopic or microscopic vesicles containing the active principle(s).

[0798] Delivery: As used herein, unless indicated otherwise or contradictory in context, the term “delivery” refers to the act or manner of delivering a compound, substance, association, combination, composition, entity, moiety, cargo or payload.

[0799] Delivery Agent: As used herein, unless indicated otherwise or contradictory in context, the term “delivery agent” refers to any substance which facilitates, at least in part, the in vivo delivery of a pharmaceutical association, combination or composition defined herein to targeted cells.

[0800] Forms suitable for oral administration: A pharmaceutical association, combination or composition for uses and methods of the invention, for example, in certain embodiments, includes forms suitable for oral administration as a tablet, capsule, pill, powder, sustained release formulations, solution, suspension, or for parenteral injection as a sterile solution, suspension or emulsion. Pharmaceutical compositions suitable for the delivery of pharmaceutical associations or combinations defined herein and methods for their preparation will be readily apparent to those skilled in the art. Such compositions and methods for their preparation may be found, for example, in certain embodiments, in ‘Remington's Pharmaceutical Sciences’, 19th Edition (Mack Publishing Company, 1995), which is hereby incorporated by reference in its entirety. Oral administration may involve swallowing, so that the compounds or associations enters the gastrointestinal tract, or buccal or sublingual administration may be employed by which the compound enters the blood stream directly from the mouth. Formulations suitable for oral administration include solid formulations, such as tablets, capsules containing particulates, liquids, or powders; lozenges (including liquid-filled), chews; multi- and nano-particulates; gels, solid solution, liposome, films (including muco-adhesive), ovules, sprays and liquid formulations. Liquid formulations include suspensions, solutions, syrups and elixirs. Such formulations may be employed as fillers in soft or hard capsules and typically comprise a carrier, for example, in certain embodiments, water, ethanol, polyethylene glycol, propylene glycol, methylcellulose, or a suitable oil, and one or more emulsifying agents and/or suspending agents. Liquid formulations may also be prepared by the reconstitution of a solid, for example, in certain embodiments, from a sachet. The pharmaceutical associations defined herein may also be used in fast-dissolving, fast-disintegrating dosage forms such as those described in the art.

[0801] Forms suitable for parenteral administration: In one example, the pharmaceutical association, combination or composition for uses and methods of the invention may be administered by parenteral injection. Exemplary parenteral administration forms include sterile solutions, suspensions or emulsions of the pharmaceutical association defined herein in sterile aqueous media, for example, in certain embodiments, aqueous propylene glycol or dextrose. In another embodiment, the parenteral administration form is a solution. Such parenteral dosage forms can be suitably buffered, if desired. Preferred sterile solutions include sodium chloride, 0.9%, UPS solution. Injectable formulations can be sterilized, for example, in certain embodiments, by filtration through a bacterial-retaining filter, and/or by incorporating sterilizing agents in the form of sterile solid compositions which can be dissolved or dispersed in sterile water or other sterile injectable medium prior to use.

[0802] Forms suitable for rectal and vaginal administration: Compositions for rectal or vaginal administration are typically suppositories which can be prepared by mixing compositions with suitable non-irritating excipients such as cocoa butter, polyethylene glycol or a suppository wax which are solid at ambient temperature but liquid at body temperature and therefore melt in the rectum or vaginal cavity and release the active ingredient.

[0803] Forms suitable for topical and/or transdermal administration: Dosage forms for topical and/or transdermal administration of a composition may include ointments, pastes, creams, lotions, gels, powders, solutions, sprays, inhalants and/or patches. Generally, an active ingredient is admixed under sterile conditions with a pharmaceutically acceptable excipient and/or any needed preservatives and/or buffers as may be required.

[0804] Forms suitable for pulmonary administration: Dosage forms for pulmonary administration via the buccal cavity may comprise dry particles which comprise the active ingredient (e.g. the pharmaceutical association defined herein) and which have a diameter in the range from about 0.5 nm to about 7 nm. Such compositions are conveniently in the form of dry powders for administration using a device comprising a dry powder reservoir to which a stream of propellant may be directed to disperse the powder and/or using a self-propelling solvent/powder dispensing container such as a device comprising the active ingredient dissolved and/or suspended in a low-boiling propellant in a sealed container. Pharmaceutical compositions formulated for pulmonary delivery may provide an active ingredient in the form of droplets of a solution and/or suspension. Such formulations may be prepared, packaged, and/or sold as aqueous and/or dilute alcoholic solutions and/or suspensions, optionally sterile, comprising active ingredient, and may conveniently be administered using any nebulization and/or atomization device. Such formulations may further comprise one or more additional ingredients including, but not limited to, a flavoring agent such as saccharin sodium, a volatile oil, a buffering agent, a surface active agent, and/or a preservative such as methylhydroxybenzoate.

[0805] Forms suitable for nasal administration: Formulations described herein as being useful for pulmonary delivery are also useful for intranasal delivery of a pharmaceutical composition. Formulations suitable for nasal administration may, for example, in certain embodiments, comprise from about as little as 0.1% (w/w) and as much as 100% (w/w) of active ingredient (e.g. the pharmaceutical association defined herein), and may comprise one or more of the additional ingredients described herein. A pharmaceutical composition may be prepared, packaged, and/or sold in a formulation suitable for buccal administration. Such formulations may, for example, in certain embodiments, be in the form of tablets and/or lozenges made using conventional methods, and may, for example, in certain embodiments, 0.1% to 20% (w/w) active ingredient, the balance comprising an orally dissolvable and/or degradable composition and, optionally, one or more of the additional ingredients described herein. Alternately, formulations suitable for buccal administration may comprise a powder and/or an aerosolized and/or atomized solution and/or suspension comprising active ingredient. Such powdered, aerosolized, and/or aerosolized formulations, when dispersed, may have an average particle and/or droplet size in the range from about 0.1 nm to about 200 nm, and may further comprise one or more of any additional ingredients described herein.

[0806] Forms suitable for ophthalmic administration: Dosage forms for ophthalmic administration include, for example, in certain embodiments, eye drops including, for example, in certain embodiments, a 0.1/1.0% (w/w) solution and/or suspension of the active ingredient (e.g. the pharmaceutical association defined herein) in an aqueous or oily liquid excipient. Such drops may further comprise buffering agents, salts, and/or one or more other of any additional ingredients described herein. Other opthalmically-administrable formulations which are useful include those which comprise the active ingredient in microcrystalline form and/or in a liposomal preparation. Ear drops and/or eye drops are contemplated as being within the scope of this present disclosure.

[0807] Direct injection: One preferred administration method for delivering a pharmaceutical association, combination or composition as defined herein is by local administration, in particular, by direct injection. Direct injection techniques are particularly useful for administering a composition to a cell or tissue that is accessible by surgery, and particularly, on or near the surface of the body. Administration of a composition locally within the area of a target cell refers to injecting the composition centimeters and preferably, millimeters from the target cell or tissue.

[0808] Dosage regimens: The dosage regimen of the pharmaceutical associations or combinations and/or pharmaceutical compositions as defined herein may be adjusted to provide the optimum desired response. For example, in certain embodiments, a single bolus may be administered, several divided doses may be administered over time or the dose may be proportionally reduced or increased as indicated by the exigencies of the therapeutic situation. The appropriate dosing regimen, the amount of each dose administered and/or the intervals between doses will depend upon the pharmaceutical association being used, the type of pharmaceutical composition, the characteristics of the subject in need of treatment and the severity of the condition being treated. Thus, the skilled artisan would appreciate, based upon the disclosure provided herein, that the dose and dosing regimen is adjusted in accordance with methods well-known in the therapeutic arts. That is, the maximum tolerable dose can be readily established, and the effective amount providing a detectable therapeutic benefit to a patient may also be determined, as can the temporal requirements for administering each agent to provide a detectable therapeutic benefit to the patient. Accordingly, while certain dose and administration regimens are exemplified herein, these examples in no way limit the dose and administration regimen that may be provided to a patient in practicing the present invention. In general, pharmaceutical compositions in accordance with the present disclosure may be administered at dosage levels sufficient to deliver from about 0.0001 mg/kg to about 100 mg/kg, from about 0.01 mg/kg to about 50 mg/kg, from about 0.1 mg/kg to about 40 mg/kg, from about 0.5 mg/kg to about 30 mg/kg, from about 0.01 mg/kg to about 10 mg/kg, from about 0.1 mg/kg to about 10 mg/kg, or from about 1 mg/kg to about 25 mg/kg, of subject body weight per day, one or more times a day, to obtain the desired therapeutic, diagnostic, prophylactic, or imaging effect. The desired dosage may be delivered three times a day, two times a day, once a day, every other day, every third day, every week, every two weeks, every three weeks, or every four weeks. In certain embodiments, the desired dosage may be delivered using multiple administrations (e.g., two, three, four, five, six, seven, eight, nine, ten, eleven, twelve, thirteen, fourteen, or more administrations). It is to be further understood that for any particular subject, specific dosage regimens should be adjusted over time according to the individual need and the professional judgment of the person administering or supervising the administration of the compositions, and that dosage ranges set forth herein are exemplary only and are not intended to limit the scope or practice of the present invention. For example, in certain embodiments, doses may be adjusted based on pharmacokinetic or pharmacodynamic parameters, which may include clinical effects such as toxic effects and/or laboratory values. Thus, the present invention encompasses intra-patient dose-escalation as determined by the skilled artisan. Determining appropriate dosages and regiments for administration of the chemotherapeutic agent are well-known in the relevant art and would be understood to be encompassed by the skilled artisan once provided the teachings disclosed herein.

[0809] Effective dose parameters: The dosage regimen of the pharmaceutical associations or combinations and/or pharmaceutical compositions as defined herein may be adjusted to obtain effective dose parameters. Effective dose parameters can be determined using methods standard in the art for a particular disease or condition. In particular, the effectiveness of dose parameters of a therapeutic composition as defined herein when treating cancer can be determined by assessing response rates. Such response rates refer to the percentage of treated patients in a population of patients that respond with either partial or complete remission. Remission can be determined by, for example, in certain embodiments, measuring tumor size or microscopic examination for the presence of cancer cells in a tissue sample.

[0810] A pharmaceutical composition as defined herein may be prepared, packaged, or sold in bulk, as a single unit dose, or as a plurality of single unit doses.

[0811] Unit dose: As used herein, unless indicated otherwise or contradictory in context, the term “unit dose” refers to a discrete amount of the pharmaceutical composition comprising a predetermined amount of the active ingredient. The amount of the active ingredient is generally equal to the dosage of the active ingredient which would be administered to a subject or a convenient fraction of such a dosage such as, for example, in certain embodiments, one-half or one-third of such a dosage.

[0812] Single unit dose: As used herein, unless indicated otherwise or contradictory in context, the term “single unit dose” refers to a dose of any therapeutic association or composition administered in one dose/at one time/single route/single point of contact, i.e., single administration event.

[0813] Split dose: As used herein, unless indicated otherwise or contradictory in context, the term “split dose” refers to the division of single unit dose or total daily dose into two or more doses.

[0814] Total daily dose: As used herein, unless indicated otherwise or contradictory in context, the term “total daily dose” refers to an amount given or prescribed in 24 hr period. It may be administered as a single unit dose.

[0815] The relative amounts of the active ingredient(s), the pharmaceutically acceptable excipients, carriers or vehicles, and any additional ingredients in a pharmaceutical composition defined herein will vary, depending upon the identity, size, and condition of the subject treated and further depending upon the route by which the composition is to be administered. In addition to the active ingredient, a pharmaceutical composition of the invention may further comprise one or more additional pharmaceutically active agents.

[0816] Combination therapy: Compounds, associations, compositions or formulations defined herein may be used in combination with one or more other therapeutic, prophylactic, diagnostic, or imaging agents. As used herein, the term “in combination with” is not intended to imply that the agents must be administered at the same time and/or formulated for delivery together, although these methods of delivery are within the scope of the present disclosure. Compounds, associations, compositions or formulations can be administered concurrently with, prior to, or subsequent to, one or more other desired therapeutics or medical procedures. In some embodiments, they are administered within about 90, 60, 30, 15, 10, 5, or 1 minute of one another. In some embodiments, the administrations of the agents are spaced sufficiently closely together such that a combinatorial (e.g., a synergistic) effect is achieved. In general, each agent will be administered at a dose and/or on a time schedule determined for that agent. In one example, the present disclosure encompasses the delivery of pharmaceutical, prophylactic, diagnostic, or imaging compositions in combination with agents that improve their bioavailability, reduce and/or modify their metabolism, inhibit their excretion, and/or modify their distribution within the body. It will further be appreciated that therapeutically, prophylactically, diagnostically, or imaging active agents used in combination may be administered together in a single composition or administered separately in different compositions. In general, it is expected that agents used in combination with be used at levels that do not exceed the levels at which they are used individually. In one example, the levels used in combination will be lower than those utilized individually. The particular combination of therapies to employ in a combination regimen will take into account compatibility of the desired therapeutics and/or procedures and the desired therapeutic effect to be achieved. It will also be appreciated that the therapies employed may achieve a desired effect for the same disorder (For example, in certain embodiments, a composition useful for treating cancer in accordance with the present disclosure may be administered concurrently with a chemotherapeutic agent), or they may achieve different effects (e.g., control of any adverse effects).

[0817] In certain embodiments, said adhesion protein inhibitor may be, separately from said GFR-binding compound, administered locally to the tumor or cancer site using appropriate means such as by injection or by incision, using one administration technique and said GFR-binding compound may then be administered locally (immediately or not) using another administration technique to the same tumor or cancer site.

[0818] In one aspect, the present disclosure thus provides at least one GFR-binding compound as defined herein for use in the prevention, diagnostic and/or treatment of a neoplastic disease in association or combination with at least one adhesion protein or molecule inhibitor as defined herein.

[0819] Also provided is a method of treating a neoplastic disease, comprising administering to a subject in need thereof an effective amount of at least one GFR-binding compound as defined herein in association or combination with at least one adhesion protein or molecule inhibitor as defined herein.

[0820] Although the descriptions of pharmaceutical associations, combinations or compositions provided herein are principally directed to pharmaceutical associations, combinations or compositions which are suitable for administration to mammals, in particular humans, it will be understood by the skilled artisan that such compositions are generally suitable for administration to animals of all sorts, in particular to any member of the Vertebrate class. Modification of pharmaceutical compositions suitable for administration to humans in order to render the compositions suitable for administration to various animals is well understood, and the ordinarily skilled veterinary pharmacologist can design and/or perform such modification with merely ordinary, if any, experimentation. Subjects to which administration of the pharmaceutical compositions is contemplated include, but are not limited to, humans and/or other primates; mammals, including commercially relevant mammals such as cattle, pigs, horses, sheep, cats, dogs, mice, and/or rats; and/or birds, including commercially relevant birds such as chickens, ducks, geese, and/or turkeys.

[0821] VIII. Dermatological Applications

[0822] When the neoplastic disease to be prevented or treated involves neoplastic cells belonging to the skin cell lineage (mainly to the fibroblast lineage), the pharmaceutical composition defined herein may be a dermatological composition comprising a pharmaceutical association or combination of a GFR-binding compound and an adhesion protein inhibitor as all defined herein and at least one dermatologically acceptable excipient.

[0823] For example, in certain embodiments, a dermatological composition for the uses of the invention may contain between 0.01% and 100% by weight (over the total weight of the dermatological composition) of a GFR-binding compound and/or an adhesion protein inhibitor, both as defined herein, as a dermatological effective amount. The dermatological composition particularly comprises between 0.01% and 95%, between 0.01% and 90%, between 0.01% and 85%, between 0.01% and 80%, between 0.01% and 75%, between 0.01% and 70%, between 0.01% and 65%, between 0.01% and 60%, between 0.01% and 55%, between 0.01% and 50%, between 0.01% and 45%, between 0.01% and 40%, between 0.01% and 35%, between 0.01% and 30%, between 0.01% and 25%, between 0.01% and 20%, between 0.01% and 15%, between 0.01% and 10%, between 0.01% and 5%, between 0.1% and 100%, between 0.1% and 95%, between 0.1% and 90%, between 0.1% and 85%, between 0.1% and 80%, between 0.1% and 75%, between 0.1% and 70%, between 0.1% and 65%, between 0.1% and 60%, between 0.1% and 55%, between 0.1% and 50%, between 0.1% and 45%, between 0.1% and 40%, between 0.1% and 35%, between 0.1% and 30%, between 0.1% and 25%, between 0.1% and 20%, between 0.1% and 15%, between 0.1% and 10%, and between 0.1% and 5% by weight (over the total weight of the dermatological composition) of any one of a GFR-binding compound or an adhesion protein inhibitor or both.

[0824] Dermatologically acceptable: As used herein, unless indicated otherwise or contradictory in context, the term “dermatologically acceptable” means that the compound(s) or pharmaceutical association(s) used are adapted for use in contact with human skin without undue toxicity, incompatibility, instability, allergic response, or their equivalents.

[0825] Dermatological formulations: Suitable formulation for implementing dermatological embodiments of the invention include an aqueous or oil-based solution, a water-based cream or gel or an oily gel, usually in a jar or a tube, particularly a shower gel, shampoo, milk, emulsion, microemulsion or nanoemulsion, particularly oil-in-water or water-in-oil or multiple of silicone-based; a lotion, particularly in a glass or plastic bottle of a spray or aerosol bottle, a blister-pack, liquid soap, a dermatological bar of soap, a pomade, mousse, an anhydrous product, preferably liquid, cream or solid, for example in the form of a stick, particularly in the form of lipstick, a cataplasm or a patch.

[0826] Preferred administration routes include, but are not limited to, topical, intradermal and intra-tumoral as already defined herein.

[0827] Dermatologically acceptable excipients: Suitable dermatologically acceptable excipients for implementing embodiments of the invention include, but are not limited to, preservatives, emollients, emulsifiers, surfactants, moisturizers, thickeners, conditioners, mattifying agents, stabilizers, antioxidants, texturizing agents, shine agents, filmogenic agents, solubilizers, pigments, colorants, perfumes, and solar filters. These excipients are preferably chosen from among the group consisting of amino acids and their derivatives, polyglycerols, esters, polymers and cellulose derivatives, lanoline derivatives, phospholipids, lactoferrins, lactoperoxidases, sucrose-based stabilizers, vitamin E and its derivatives, natural and synthetic waxes, vegetable oils, triglycerides, insaponifiables, phytosterols, plant esters, silicones and their derivatives, protein hydrolysates, jojoba oil and its derivatives, lipo/hydrosoluble esters, betaines, aminoxides, saccharose ester plant extracts, titanium dioxides, glycines, parabens, and even more preferably from among the group consisting of butylene glycol, glycol-15 stearyl ether, cetearyl alcohol, phenoxyethanol, methylparaben, propylparaben, butylparaben, butylenes glycol, natural tocopherols, glycerine, dihydroxycetyl sodium phosphate, isopropyl hydroxycetyl ether, le glycol stearate, triisononanoin, octyl cocoate, polyacrylamide, isoparaffin, laureth-7, carbomer, propylene glycol, glycerol, bisabolol, dimethicone, sodium hydroxide, PEG 30-dipolyhydroxysterate, capric/caprylic triglycerides, cetearyl octanoate, dibutyl adipate, grapeseed oil, jojoba oil, magnesium sulfate, EDTA, cyclomethicone, xanthan gum, citric acid, sodium lauryl sulfate, mineral waxes and oils, isostearyl isostearate, dipelargonate of propylene glycol, isostearate of propylene glycol, PEG 8, beeswax, glyceride of hydrogenated palm kernel oil, lanolin oil, sesame oil, cetyl lactate, lanolin alcohol, titanium dioxide, lactose, saccharose, low-density polyethylene, and isotonic salt solution.

[0828] In one example, the dermatological composition as defined herein may contain at least one other active agents and/or excipients and/or additives of pharmaceutical, especially dermatological, interest such as agents with the following properties:
[0829] wound-healing properties; such as panthenol and derivatives thereof, for example ethyl panthenol, aloe vera, pantothenic acid and derivatives thereof, allantoin, bisabolol, and dipotassium glycyrrhizinate;
[0830] anti-inflammatory properties: such as steroidal and non-steroidal antiinflammatories, in particular Inhibitors of the production of cytokines and chemokines, of cyclooxygenase, of nitric oxide (NO) and nitric oxide synthase (NOS). As an example of anti-inflammatory products, mention may be made of extracts of Ginkgo biloba, trilactone terpenes such as ginkgolides, especially ginkgolide B and bilobalide known for their platelet-activating factor (PAF) antagonist properties.

[0831] The CTFA Cosmetic Ingredient Handbook, Second Edition (1992), which is hereby incorporated by reference in its entirety, describes different cosmetic and pharmaceutical ingredients currently used in the cosmetic and pharmaceutical industry that are particularly adapted to topical use and which may be used in a dermatological composition of the invention. Examples of these types of ingredients include but are not limited to the following compounds: abrasives, absorbent compounds, compounds with aesthetic purposes such as perfumes, pigments, colorants, essential oils, astringents, etc. (for example: clove oil, menthol, camphor, eucalyptus oil, eugenol, menthyl lactate, and hamelis distillate), anti-acne agents, anti-flocculant agents, anti-foaming agents, anti-microbial agents (for example iodopropyl butylcarbamate), les antioxidants, bonding agents, biological additives, tampon agents, swelling agents, chelatants, additives, biocidal agents, denaturants, external analgesics, film-forming materials, polymers, opacifying agents, pH adjusters, reducing agents, depigmenting or lightening agents (for example: hydroquinone, kojic acid, ascorbic acid, magnesium ascorbyl phosphate, ascorbyl glucosamine), conditioning agents (for example: humectants), calming agents for the skin and/or scarring agents (for example: panthenol and its derivatives, for example ethyl panthenol), aloe vera, pantothenic acid and its derivatives, allantoin, bisabolol and dipotassium glycyrrhizinate), thickeners, vitamins, and the derivatives or equivalents of these.

[0832] In one aspect, the present disclosure provides a pharmaceutical association or combination as defined herein or a dermatological composition as defined herein for use in converting a neoplastic skin cell (i.e. any cell belonging to the fibroblast lineage as defined herein) into a non-neoplastic skin cell, in particular into a functional and/or healthy skin cell.

[0833] In one aspect, the present disclosure provides a pharmaceutical association or combination as defined herein or a dermatological composition as defined herein for use in protecting (i.e. preventing and/or treating) a subject or patient from a skin neoplastic disease, disorder or condition, in particular, but not limited to, basal and squamous cell skin cancers, melanoma skin cancer, Merkel cell carcinoma, lymphoma of the skin and Kaposi sarcoma.

[0834] Suitable as amounts of pharmaceutical association for implementing embodiments of the invention in the dermatological field include the group consisting of between about 0.0001 mg/day to about 5000 mg/day, between about 0.0001 mg/day to about 1000 mg/day, between about 0.0001 mg/day to about 10 mg/day, between about 0.0001 mg/day to about 1 mg/day, or between about 0.0001 mg/day to about 100 mg/day, all being preferred for implementing embodiments of the invention.

[0835] Advantageously, the subject who has need thereof is a subject chosen from a population having an average age of more than 30 years old or who has had sunlight over-exposure, has a family history of skin cancer, has or has had certain other skin conditions or previous radiotherapy, has been exposed to certain chemicals and has a weakened immune system.

[0836] IX. Ophthalmic Applications

[0837] Preferable dosage forms for the pharmaceutical association, combination or composition as defined herein for treating ophthalmic neoplastic diseases, disorders or conditions include, for example, in certain embodiments, eye drops and eye ointments. These can be prepared using conventional techniques. For instance, eye drops may be prepared, using isotonic agents such as sodium chloride, buffers such as sodium phosphate, and preservatives such as benzalkonium chloride. A suitable pH is within an ophthalmologically acceptable range. Preferred pH is within pH 4 to 8.

[0838] Particularly preferred administration routes include vitreal, intraocular and intra-tumoral.

[0839] A suitable dose of pharmaceutical association, combination or composition for treating eye disorders is appropriately selected, depending on the symptoms, age of patients, dosage form and the like. For eye drops, suitable concentration may be 0.0001 to 10 w/v %, preferably 0.0001 to 0.01 w/v % for administration into eyes once or several times a day.

[0840] X. Surgical Treatments

[0841] In one aspect, the pharmaceutical association, combination or composition as defined herein may be used in a surgical method suitable for treating or preventing a neoplastic disease such as a tumour or a cancer.

[0842] In one aspect, the present disclosure provides a surgical method for surgical treatment of a neoplastic disease comprising the provision of a pharmaceutical association, combination or composition as defined herein, and the contacting or administration of said pharmaceutical association, combination or composition with a body part of a patient to be treated.

[0843] For example, in certain embodiments, the surgical treatment of the invention may include the provision of a placement, insertion or depositing device and the contacting of said pharmaceutical association, combination or composition with a body part of a patient using said placement, insertion or depositing device.

[0844] In one example, said placement, insertion or depositing device comprises an injection device such as a syringe, and comprises the positioning of said pharmaceutical association, combination or composition inside said injection device for injection into a subject/patient or into a body part of a subject/patient.

[0845] XI. Pharmaceutical Applications, Uses and Methods

[0846] The present invention provides for uses and methods of converting or inducing the conversion or the recoding of a neoplastic cell (e.g. a cancer cell) into a non-neoplastic cell (e.g. a non-cancerous cell) through extracellular, non-mutagenic, conversion or recoding of said neoplastic cell. In other words, the present disclosure provides methods for a neoplastic cell to perform self-healing or self-recovery into a more functional, healthy, non-neoplastic cell.

[0847] Conveniently, such a self-healing process is generally achieved within less than 7 days. In particular, such a self-healing process is generally achieved within less than 6 days. In particular, such a self-healing process is generally achieved within less than 5 days. In particular, such a self-healing process is generally achieved within less than 4 days. In particular, such a self-healing process is generally achieved within less than 3 days. In particular, such a self-healing process is generally achieved within less than 2 days. In particular, such a self-healing process is generally achieved within less than 24 hours. In particular, such a self-healing process is generally achieved within less than 18 hours.

[0848] Conveniently, such a self-healing process is achieved with a cell conversion yield greater than about 50%. In particular, such a self-healing process is achieved with a cell conversion yield greater than about 60%. In particular, such a self-healing process is achieved with a cell conversion yield greater than about 70%. In particular, such a self-healing process is achieved with a cell conversion yield greater than about 80%. In particular, such a self-healing process is achieved with a cell conversion yield greater than about 90%. In particular, such a self-healing process is achieved with a cell conversion yield greater than about 95%. In particular, such a self-healing process is achieved with a cell conversion yield is about 100%.

[0849] Cell conversion yield: As used herein, “cell conversion yield” means the percentage of neoplastic cells that are transformed into non-neoplastic cells. It is considered significant when it is higher than 10%. There are many ways to measure a cell conversion yield, but for the purpose of the present disclosure, and for the avoidance of any doubts, the cell conversion yield is herein measured by using a haemocytometer for precise cell counting using, for instance, a haemocytometer from Baxter Scientific and following the standard procedure below:
[0850] (a) Cleaning the chamber and cover slip with alcohol. Drying and fixing the coverslip in position.
[0851] (b) Harvesting the cells. Adding 10 μL of the cells to the haemocytometer.
[0852] (c) Placing the chamber in the inverted microscope under a 10× objective. Using phase contrast to distinguish the cells.
[0853] (d) Counting the cells in the large, central gridded square (1 mm²). The gridded square is circled in the graphic below. Multiplying by 10⁴ to estimate the number of cells per mL.
[0854] (e) Preparing duplicate samples and averaging the count.

[0855] In certain embodiments, the present disclosure provides methods to convert a neoplastic cell into a non-neoplastic cell, wherein said obtained neoplastic cell is homogeneous and/or of substantially the same differentiation state. Conveniently, the converted non-neoplastic cells obtained using a method as defined herein, have a homogeneity of greater than 20%. In particular, the converted non-neoplastic cells obtained using a method as defined herein, have a homogeneity of greater than 50%. In particular, the converted non-neoplastic cells obtained using a method as defined herein, have a homogeneity of greater than 70%. In particular, the converted non-neoplastic cells obtained using a method as defined herein, have a homogeneity of greater than 90%. In particular, the converted non-neoplastic cells obtained using a method as defined herein, have a homogeneity of greater than 99%.

[0856] Homogeneous: As used herein, “homogeneous”, when used in relation to a non-neoplastic cell population obtained using methods as defined herein, means that substantially all of the obtained non-neoplastic cells within the population are in a G0 phase. There are many ways to test and measure the homogeneity of a cell population, but for the purpose of the present disclosure, and for the avoidance of any doubts, the cell homogeneity is herein measured using cell immunofluorescence staining by detecting phosphorylation of the Rb protein, an absence of phosphorylation meaning that substantially all cells are in a G0 phase.

[0857] Conveniently, the converted non-neoplastic cells obtained using a method as defined herein, are more than 20% identical. In particular, the converted non-neoplastic cells obtained using a method as defined herein, are more than 50% identical. In particular, the converted non-neoplastic cells obtained using a method as defined herein, are more than 70% identical. In particular, the converted non-neoplastic cells obtained using a method as defined herein, are more than 90% identical. In particular, the converted non-neoplastic cells obtained using a method as defined herein, are more than 99% identical.

[0858] As used herein, “substantially the same differentiation state” or “substantially identical differentiation state”, when used in relation to non-neoplastic cells obtained using methods as defined herein, means exhibiting the same gene expression pattern. There are many ways to test and measure the differentiation state of a cell and group of cells, but for the purpose of the present disclosure, and for the avoidance of any doubts, the differentiation state of a cell or a group of cell is herein measured using RT-PCR for the quantification of the expression of well-defined marker genes for the particular differentiation state.

[0859] In certain aspects, a pharmaceutical association, combination or composition as defined herein is thus useful in the protection of a subject/patient from (e.g. in the treatment and/or prevention of) a neoplastic disease, condition, disorder or pathology and/or at least one symptom thereof such as tumors and cancers. In one aspect, the present disclosure provides a pharmaceutical association, combination or (therapeutic, dermatologic, ophthalmologic, diagnostic, etc.) composition defined herein for use in the treatment of a neoplastic disease, condition, disorder or pathology and/or at least one symptom thereof, said composition comprising a GFR-binding compound and an adhesion protein inhibitor, all as already defined herein. Also provided is a method of treating a neoplastic disease, comprising administering to a subject in need thereof an effective amount of a pharmaceutical association, combination or (therapeutic, dermatologic, ophthalmologic, diagnostic, etc.) composition as defined herein.

[0860] In one aspect, the present disclosure provides a pharmaceutical association, combination or (therapeutic, dermatologic, ophthalmologic, diagnostic, etc.) composition defined herein for use in a method of converting or recoding a neoplastic cell to induce and/or promote and/or improve self-healing and/or self-recovery thereof. Also provided is a method of converting or recoding a neoplastic cell to induce and/or promote and/or improve self-healing and/or self-recovery thereof, comprising administering to a subject in need thereof an effective amount of a pharmaceutical association, combination or (therapeutic, dermatologic, ophthalmologic, diagnostic, etc.) composition as defined herein.

[0861] In one example, the conversion or recoding of the neoplastic cell into a non-neoplastic cell is substantially permanent. As used herein, the term “permanent”, when used in relation to the conversion or recoding of a neoplastic cell into a non-neoplastic cell, means physiologically permanent conversion as the neoplastic cell treated by the method of the invention then becomes a normal, functional, healthy cell just like any other non-neoplastic cell of the subject's body and is thus not prevented to develop a new neoplastic state or any other abnormal state in the future (like any normal cell could/would).

[0862] In one aspect, the present disclosure provides a pharmaceutical association, combination or (therapeutic, dermatologic, ophthalmologic, diagnostic, etc.) composition defined herein for use in a method of restoring the ability of a neoplastic cell to undergo differentiation. Also provided is a method of restoring the ability of a neoplastic cell to undergo differentiation, comprising administering to a subject in need thereof an effective amount of a pharmaceutical association, combination or (therapeutic, dermatologic, ophthalmologic, diagnostic, etc.) composition as defined herein.

[0863] In one aspect, the present disclosure provides a pharmaceutical association, combination or (therapeutic, dermatologic, ophthalmologic, diagnostic, etc.) composition defined herein for use in a method of converting and/or recoding a circulating or non-circulating neoplastic cell such as a metastatic or non-metastatic cancer cell, into a non-neoplastic cell. Also provided is a method of converting and/or recoding a circulating or non-circulating neoplastic cell such as a metastatic or non-metastatic cancer cell, into a non-neoplastic cell, comprising administering to a subject in need thereof an effective amount of a pharmaceutical association, combination or (therapeutic, dermatologic, ophthalmologic, diagnostic, etc.) composition as defined herein.

[0864] In one aspect, the present disclosure provides a pharmaceutical association, combination or (therapeutic, dermatologic, ophthalmologic, diagnostic, etc.) composition defined herein for use in a method of providing and/or producing and/or inducing the formation of a physiologically functional and/or healthy cell of the bone, cartilage, vascular, blood, fibroblast, muscle, neural, epithelial, renal, retinal cell lineage from a neoplastic cell. Also provided is a method of providing and/or producing and/or inducing the formation of a physiologically functional and/or healthy cell of the bone, cartilage, vascular, blood, fibroblast, muscle, neural, epithelial, renal, retinal cell lineage from a neoplastic cell, comprising administering to a subject in need thereof an effective amount of a pharmaceutical association, combination or (therapeutic, dermatologic, ophthalmologic, diagnostic, etc.) composition as defined herein.

[0865] In one aspect, the present disclosure provides a pharmaceutical association, combination or (therapeutic, dermatologic, ophthalmologic, diagnostic, etc.) composition defined herein for use in a method of inducing and/or promoting and/or enhancing neoplastic cell differentiation. Also provided is a method of inducing and/or promoting and/or enhancing neoplastic cell differentiation, comprising administering to a subject in need thereof an effective amount of a pharmaceutical association, combination or (therapeutic, dermatologic, ophthalmologic, diagnostic, etc.) composition as defined herein.

[0866] In one aspect, the present disclosure provides a pharmaceutical association, combination or (therapeutic, dermatologic, ophthalmologic, diagnostic, etc.) composition defined herein for use in a method of non-mutagenically protecting a subject from a neoplastic disease i.e. without modifying or altering the genome of the treated neoplastic cells. Also provided is a method of non-mutagenically protecting a subject from a neoplastic disease i.e. without modifying or altering the genome of the treated neoplastic cells, comprising administering to a subject in need thereof an effective amount of a pharmaceutical association, combination or (therapeutic, dermatologic, ophthalmologic, diagnostic, etc.) composition as defined herein.

[0867] In one aspect, the present disclosure provides a pharmaceutical association, combination or (therapeutic, dermatologic, ophthalmologic, diagnostic, etc.) composition defined herein for use in a method of extracellular treatment of a neoplastic disease, disorder, condition, pathology, or any symptoms thereof. Also provided is a method of extracellular treatment of a neoplastic disease, disorder, condition, pathology, or any symptoms thereof, comprising administering to a subject in need thereof an effective amount of a pharmaceutical association, combination or (therapeutic, dermatologic, ophthalmologic, diagnostic, etc.) composition as defined herein.

[0868] An extracellular treatment as used herein implies at least one (in particular, all) biological action/effect to be provided or to occur outside the cell to be treated (i.e. a neoplastic cell). In other words, the biologically active agent (e.g. the pharmaceutical association, combination or composition as defined herein) delivers/provides its biological/pharmaceutical effect to the outside of the cell (e.g. on the cell's surface) without the need to penetrate through the cell membrane, inside the neoplastic cell to be treated. Once the extracellular action/effect has been administered/delivered to the neoplastic cell to be treated, said active agent may be, for instance, excreted from the host organism with or without being metabolised, and/or tagged to be destroyed through apoptotic routes, and/or internalised by nearby cells, etc. . . . . Without being bound to any specific theory, it is believed that once the extracellular biological action/effect/message/signal has been delivered by the pharmaceutical association or composition defined herein to a neoplastic cell to be treated, said cell then undergo self-healing into a functional, healthy, non-neoplastic cell.

[0869] Data have shown (FIG. 6) that the administration or action of the pharmaceutical association or composition as defined herein on neoplastic cells to be treated, implicates and down-regulates (in particular, reduces, substantially reduces or suppress) the Ras/MAP kinase, FAK/Src kinase and/or PIP2 signalling pathways. Without wishing to be bound to any specific theory, it is conventionally known that these pathways control the expression of cyclins D, which in turn controls the activity of CDKs 4 and/or 6 so that down-regulating (in particular, reducing, significantly reducing or suppressing) the Ras/MAP kinase, FAK/Src kinase and/or PIP2 pathways would inhibit, reduce, damper or suppress the expression of cyclins D and/or CDK4 and CDK6 and/or the formation of the cyclins D-CDK4/6 complexes.

[0870] As already stated herein, cell cycle comprises four main phases: The S phase for DNA duplication, followed by a G2 phase for preparation of the entry into the M phase, the M or mitotic phase wherein the cell divides and finally the G1 phase for cell growth. During the G1 phase the cell makes decisions on whether to continue the cell cycle and undergo cell growth and further divide, or to exit the cycle in the G0 phase and remains quiescent, die or initiate differentiation. The progression through the cell cycle is governed by phosphorylation signals emitted by different bimolecular complexes composed of CDKs and cyclin proteins, both as defined herein.

[0871] The cyclin D-CDK4/6 complexes are capable of leading a cell through the restriction (R)-point which is generally known for controlling the passage of the cell from the G1 phase to the S phase of the cell cycle. This control gate is generally thought to be located at the end of the cell cycle's G1 phase, just before entry into S phase, and is involved in the decision of whether the cell should divide or proliferate, delay division, or enter the G0 resting state.

[0872] This control gate ensures that a series of surveillance or monitoring mechanisms are completed successfully before proceeding through to the next phase. These monitoring mechanisms are also commonly termed “checkpoints” or “checkpoint controls”. If a checkpoint is not validated by the control gate, the cell should halt further advance through the cell cycle and enter the G0 phase. However, neoplastic cells, such as cancer cells, have developed mechanisms that somehow “disconnect” or “impair” one or more checkpoints from the control gate so that the cell is “tricked to “believe that all checkpoints are validated (or, in other words, “tricked to ignore” the non-validated status of relevant checkpoints) and thus never or rarely enter into the G0 phase.

[0873] Without wishing to be bound to any specific theory, it is thought that the pharmaceutical associations, combination or composition as defined herein can restore or re-establish (the integrity of) one or more impaired cell cycle checkpoints so as to restore the lost ability of a neoplastic cell to detect a malfunction or a defect in the cell cycle regulation, induce the cell cycle arrest and exit the cell cycle in G0.

[0874] One particular checkpoint that the present invention is able to restore is the cell adhesion checkpoint. In one aspect, the present disclosure provides a pharmaceutical association, combination or (therapeutic, dermatologic, ophthalmologic, diagnostic, etc.) composition defined herein for use in a method of treating a neoplastic cell or a neoplastic disease by restoring the cell adhesion checkpoint of said neoplastic cell.

[0875] The cell adhesion checkpoint is known to be in charge of monitoring the cells attachments to the extracellular matrix (ECM). When a cell does not detect a “correct” attachment it should halt further advance through the cell cycle and enter the Go phase. The ECM attachment is normally achieved via cell transmembrane proteins, such as the integrins, syndecans and different proteoglycans. The most important among these are the integrins, which assemble as alpha-beta heterodimers. In addition to physically linking the cell to the extracellular matrix, the binding of the extracellular integrin domains to specific components of the ECM activates the integrins and allows binding of different signalling molecules to its intracellular domain. This activates various signalling pathways that mediate signals to the adhesion checkpoint including the Ras/MAP kinase, FAK/Src kinase, and PIP2 pathways. These pathways are involved in the regulation of the expression of cyclins D, which in turn controls the activity of CDK4/6. The cyclins D-CDK4/6 complexes are capable of leading the cell through the R-point gate.

[0876] Data have also shown (FIGS. 6 and 7) that the administration or action of the pharmaceutical association or composition as defined herein on neoplastic cells to be treated down-regulated (in particular, substantially reduced) the expression of FAK genes and proteins and/or MAP kinase and/or reduced (in particular, substantially reduced) the expression or activity of GTPase Ras, Rho (Rho, Rac, Cdc42).

[0877] Focal adhesions are integrin-containing, multi-protein structures that can form mechanical links between the intracellular actin bundles and the extracellular substrate in many cell types. Focal adhesions are highly dynamic structures that grow or shrink due to the turnover of their component proteins in response to changing mechanical stresses (e.g. actomyosin-generated forces, external forces exerted by or through the surrounding matrix). Focal adhesions are consistently found at the end of stress fibers and are therefore highly integrated with the bulk of the cytoskeleton. Consequently, focal adhesions serve to transmit force, internally generated by the cytoskeletal network, to the ECM and vice versa vian adhesion receptors. Adhesion assembly and maturation are highly dependent on the presence of force, which is believed to instigate structural rearrangements that in turn foster the recruitment of additional proteins (growth) and induce signaling cascades leading to actin polymerization (strengthening). Focal adhesions serve as a biochemical signaling hub to concentrate and direct numerous signaling proteins as part of signal transduction cascades at sites of integrin binding and clustering.

[0878] Focal Adhesion Kinase (FAK) is a cytoplasmic tyrosine kinase that plays a role in integrin-mediated signal transductions and also participates in signalling via other cell surface receptors. FAK is typically located in structures known as focal adhesions. These are multi-protein structures that link the extracellular matrix (ECM) to the cytoplasmic cytoskeleton. FAK is known to be phosphorylated in response to integrin engagement, growth factor stimulation, and the action of mitogenic neuropeptides. This cytosolic kinase has been reported to participate to diverse cellular mechanisms including cell locomotion, mitogen response and cell survival. FAK has four defined regions, or tertiary structure domains. Two of these domains, the N-terminal FERM domain and the Kinase domain, form an auto-inhibitory interaction. This interaction is thought to be the result of hydrophobic interactions between the two domains and prevents the activation of the Kinase domain, thereby preventing the signalling function of FAK. Release of this auto-inhibitory interaction has been shown to occur within focal adhesions but not in the cytoplasm and therefore is thought to require interaction with focal adhesion proteins.

[0879] MAP kinase Mitogen-activated protein kinases or MAP kinases (or MAPK) include a large group of related serine/threonine eukaryotic protein kinases whose regulatory cell functions include proliferation, gene expression, differentiation, mitosis, cell survival, and apoptosis. All have been reported to become activated when they have been phosphorylated at a Tyrosine and a Threonine amino acid. MAP kinases are catalytically inactive in their basic form. In order to become active, (potentially multiple) phosphorylation events is required to occur in their activation loops. MAP kinases typically form multi-step pathways, receiving input signals at several levels above the actual MAP kinase. These pathways can effectively convey stimuli from the cell membrane to the nucleus or to many other subcellular targets.

[0880] GTPases (singular GTPase) are a large family of hydrolase enzymes that can bind and hydrolyze guanosine triphosphate (GTP). The GTP binding and hydrolysis takes place in the highly conserved G domain common to all GTPases. The hydrolysis of the γ phosphate of GTP into guanosine diphosphate (GDP) and Pi, inorganic phosphate, occurs by the SN2 mechanism of nucleophilic substitution via a pentavalent intermediate state and is dependent on the magnesium ion Mg²⁺. Regulatory GTPases, also called the GTPase superfamily, are GTPases used for regulation of other biochemical processes. Most prominent among the regulatory GTPases are the G proteins. Small GTPases have a molecular weight of about 21 kDa and generally serve as molecular switches for a variety of cellular signalling events.

[0881] According to their primary amino acid sequences and biochemical properties, the Ras superfamily is further divided into five subfamilies: Ras, Rho, Rab, Arf and Ran. The Rho subfamily is further divided into RHOA, RAC1, and CDC42.

[0882] Ras/MAP kinase signalling pathway (also known as the Ras-Raf-MEK-ERK pathway) is a chain of proteins in the cell that communicates a signal from a receptor on the surface of the cell to the DNA in the nucleus of the cell. The signal starts when a signalling molecule binds to the receptor on the cell surface and ends when the DNA in the nucleus expresses a protein and produces some change in the cell, such as cell division. The pathway includes many proteins, including MAPK (mitogen-activated protein kinases, originally called ERK, extracellular signal-regulated kinases), which communicate by adding phosphate groups to a neighbouring protein.

[0883] The FAK/Src kinase signalling pathway involves focal adhesion kinase (FAK) and steroid receptor coactivator (Src) which are intracellular (non-receptor) tyrosine kinases that physically and functionally interact to promote a variety of cellular responses. The linked activities of these two kinases are a common intracellular point of convergence in the signalling initiated by the integrin-extracellular matrix (ECM) interaction. Integrins, a family of transmembrane receptors, interact with the ECM and the intracellular actin-cytoskeleton. The integrins cluster upon binding to the ECM to form focal adhesion (FA) contacts. In response to this clustering, FAK associates to the cytoplasmic tail of the integrins and undergoes phosphorylation at its tyrosine 397 residue (Y397). This phosphorylated tyrosine provides a docking site for Src which is then able to phosphorylate additional sites on FAK, leading to a further increase in FAK activity and allowing the recruitment of proteins that contain Src homology 2 (SH2) domains such as Grb2 and PI3K. The mutually activated FAK/Src complex then initiates a cascade of phosphorylation events of new protein-protein interactions to trigger several signalling pathways that eventually leads to different cellular responses.

[0884] Phosphatidylinositol 4,5-bisphosphate or PIP2 is a minor phospholipid component of cell membranes. PIP2 is enriched at the plasma membrane where it is a substrate for a number of important signalling proteins. PIP2 is phosphorylated by the Class I PI 3-kinases. Class I PI 3-kinases are a subgroup of the enzyme family, phosphoinositide 3-kinase that possess a common protein domain structure, substrate specificity, and method of activation. Class I PI 3-kinases are further divided into two subclasses, class IA PI 3-kinases and class IB PI 3-kinases. Class IA PI 3-kinases are activated by receptor tyrosine kinases (RTKs). Class IB PI3-kinases are activated by G-protein-coupled receptors (GPCRs). After their activation these kinases phosphorylate PIP2 to form phosphatidylinositol (3,4,5)-trisphosphate PIP3. Both PIP2 and PIP3 not only act as substrates for enzymes but also serve as docking phospholipids that bind specific domains that promote the recruitment of proteins to the plasma membrane and subsequent activation of signalling cascades. PIP3 functions to activate downstream signalling components, the most notable one being the protein kinase AKT, which activates downstream anabolic signalling pathways required for cell growth and survival.

[0885] Consequently, any associations, combinations or compositions comprising a GFR-binding compound and an adhesion protein inhibitor as defined herein, which, when used to convert a neoplastic cell into a non-neoplastic cell and treat/prevent/diagnose a neoplastic disease, down-regulate (in particular, substantially reduce) the expression of FAK genes and proteins and/or MAP kinase and/or reduce (in particular, substantially reduce) the expression or activity of GTPase Ras, Rho (Rho, Rac, Cdc42) in-vitro or in-vivo, shall be considered as being comprised within the scope of the present invention.

[0886] In one aspect, the present disclosure provides a pharmaceutical association, combination or (therapeutic, dermatologic, ophthalmologic, diagnostic, etc.) composition defined herein for use in a method of treating a neoplastic cell or a neoplastic disease by down-regulating (in particular, substantially reducing) the expression of FAK genes and proteins and/or MAP kinase and/or reducing (in particular, substantially reducing) the expression or activity of GTPase Ras, Rho (Rho, Rac, Cdc42) in-vitro or in-vivo. Also provided is a method of treating a neoplastic cell or a neoplastic disease by down-regulating (in particular, substantially reducing) the expression of FAK genes and proteins and/or MAP kinase and/or reducing (in particular, substantially reducing) the expression or activity of GTPase Ras, Rho (Rho, Rac, Cdc42) in-vitro or in-vivo, comprising administering to a subject in need thereof an effective amount of a pharmaceutical association, combination or (therapeutic, dermatologic, ophthalmologic, diagnostic, etc.) composition as defined herein.

[0887] Consequently, in certain embodiments, any associations, combinations or compositions comprising a GFR-binding compound and an adhesion protein inhibitor as defined herein, which, when used to convert a neoplastic cell into a non-neoplastic cell and treat/prevent a neoplastic disease, possesses at least one, preferably more than one, of the above defined biological and/or therapeutic parameters or effects (e.g. down-regulation of the Ras/MAP kinase, FAK/Src kinase and/or PIP2 signalling pathways and/or inhibition of gene expression or formation of cyclins D and/or down-regulation of the cyclin D/CDKs complexes), shall be considered as being comprised within the scope of the present invention.

[0888] In one aspect, the present disclosure provides a pharmaceutical association, combination or (therapeutic, dermatologic, ophthalmologic, diagnostic, etc.) composition defined herein for use in a method of converting a neoplastic cell into a non-neoplastic cell or treating/preventing a neoplastic disease by substantially inhibiting, down-regulating or dampening the gene expression or formation of at least one of, in particular a plurality of, the cyclin D proteins. Also provided is a method of converting a neoplastic cell into a non-neoplastic cell or treating/preventing a neoplastic disease by substantially inhibiting, down-regulating or dampening the gene expression or formation of at least one of, in particular a plurality of, the cyclin D proteins, comprising administering to a subject in need thereof an effective amount of a pharmaceutical association, combination or (therapeutic, dermatologic, ophthalmologic, diagnostic, etc.) composition as defined herein.

[0889] In one aspect, the present disclosure provides a pharmaceutical association, combination or (therapeutic, dermatologic, ophthalmologic, diagnostic, etc.) composition defined herein for use in a method of converting a neoplastic cell into a non-neoplastic cell or treating/preventing a neoplastic disease by substantially inhibiting the formation of at least one of, in particular a plurality of, the protein complexes comprising at least one cyclin D and at least one CDK4 or CDK6. Also provided is a method of converting a neoplastic cell into a non-neoplastic cell or treating/preventing a neoplastic disease by substantially inhibiting the formation of at least one of, in particular a plurality of, the protein complexes comprising at least one cyclin D and at least one CDK4 or CDK6, comprising administering to a subject in need thereof an effective amount of a pharmaceutical association, combination or (therapeutic, dermatologic, ophthalmologic, diagnostic, etc.) composition as defined herein.

[0890] In one aspect, the present disclosure provides a pharmaceutical association, combination or (therapeutic, dermatologic, ophthalmologic, diagnostic, etc.) composition as defined herein for use in a method of converting a neoplastic cell into a non-neoplastic cell or treating/preventing a neoplastic disease without inducing the death of said neoplastic cell. Also provided is a method of converting a neoplastic cell into a non-neoplastic cell or treating/preventing a neoplastic disease without inducing the death of said neoplastic cell, comprising administering to a subject in need thereof an effective amount of a pharmaceutical association, combination or (therapeutic, dermatologic, ophthalmologic, diagnostic, etc.) composition as defined herein.

[0891] In one aspect, the present disclosure provides a pharmaceutical association, combination or (therapeutic, dermatologic, ophthalmologic, diagnostic, etc.) composition as defined herein for use as a G0 cell cycle phase inducer.

[0892] In one aspect, the present disclosure provides a pharmaceutical association, combination or (therapeutic, dermatologic, ophthalmologic, diagnostic, etc.) composition for use in a method of converting a neoplastic cell into a non-neoplastic cell or treating/preventing a neoplastic disease by dampening or arresting cell division and/or cell proliferation of said neoplastic cell. Also provided is a method of converting a neoplastic cell into a non-neoplastic cell or treating/preventing a neoplastic disease by dampening or arresting cell division and/or cell proliferation of said neoplastic cell, comprising administering to a subject in need thereof an effective amount of a pharmaceutical association, combination or (therapeutic, dermatologic, ophthalmologic, diagnostic, etc.) composition as defined herein.

[0893] In one aspect, the present disclosure provides a pharmaceutical association, combination or (therapeutic, dermatologic, ophthalmologic, diagnostic, etc.) composition for use in a method of converting a neoplastic cell into a non-neoplastic cell or treating/preventing a neoplastic disease by activating and/or promoting anti-mitogen activity and/or tumor suppressor pathways and/or anti-oncogenic activity in said neoplastic cell. Also provided is a method of converting a neoplastic cell into a non-neoplastic cell or treating/preventing a neoplastic disease by activating and/or promoting anti-mitogen activity and/or tumor suppressor pathways and/or anti-oncogenic activity in said neoplastic cell, comprising administering to a subject in need thereof an effective amount of a pharmaceutical association, combination or (therapeutic, dermatologic, ophthalmologic, diagnostic, etc.) composition as defined herein.

[0894] Data have also shown (FIG. 7) that the administration or action of the pharmaceutical association, combination or composition as defined herein on neoplastic cells to be treated, down-regulated (in particular, substantially reduced) the expression of paxillin and/or up-regulated (in particular, substantially increased) the expression of vinculin.

[0895] Paxillin is a signal transduction adaptor protein. The C-terminal region of paxillin contains four LIM domains that target paxillin to focal adhesions through a direct association with the cytoplasmic tail of beta-integrin. The N-terminal region of paxillin is rich in protein-protein interaction sites. The proteins that bind to paxillin are diverse and include protein tyrosine kinases, such as Src and focal adhesion kinase (FAK), structural proteins, such as vinculin and actopaxin, and regulators of actin organization, such as COOL/PIX and PKL/GIT. Paxillin is tyrosine-phosphorylated by FAK and Src upon integrin engagement or growth factor stimulation, creating binding sites for the adapter protein Crk.

[0896] Vinculin is a focal adhesion protein that is involved in linkage of integrin adhesion molecules to the actin cytoskeleton. Vinculin is a cytoskeletal protein associated with cell-cell and cell-matrix junctions, where it is thought to function as one of several interacting proteins involved in anchoring F-actin to the membrane. Vinculin is a 117-kDa cytoskeletal protein of 1066 amino acids. The protein contains an acidic N-terminal domain and a basic C-terminal domain separated by a proline-rich middle segment. Vinculin consists of a globular head domain that contains binding sites for talin and α-actinin as well as a tyrosine phosphorylation site, while the tail region contains binding sites for F-actin, paxillin, and lipids.

[0897] Consequently, any associations, combinations or compositions comprising a GFR-binding compound and an adhesion protein inhibitor as defined herein, which, when used to convert a neoplastic cell into a non-neoplastic cell and treat/prevent/diagnose a neoplastic disease, down-regulate the expression of paxillin and/or (preferably and) up-regulate the expression of vinculin in-vitro or in-vivo, shall be considered as being comprised within the scope of the present invention.

[0898] In one aspect, the present disclosure thus provides a pharmaceutical association, combination or (therapeutic, dermatologic, ophthalmologic, diagnostic, etc.) composition defined herein for use in a method of treating a neoplastic cell or a neoplastic disease by down-regulating the expression of paxillin and/or (preferably and) up-regulating the expression of vinculin in-vitro or in-vivo. Also provided is a method of treating a neoplastic cell or a neoplastic disease by down-regulating the expression of paxillin and/or (preferably and) up-regulating the expression of vinculin in-vitro or in-vivo, comprising administering to a subject in need thereof an effective amount of a pharmaceutical association, combination or (therapeutic, dermatologic, ophthalmologic, diagnostic, etc.) composition as defined herein.

[0899] Data have also shown (FIGS. 1 to 4) that the administration or action of the pharmaceutical association, combination or composition as defined herein on neoplastic cells to be treated, up-regulated (in particular, substantially increased) the expression of at least one differentiation genes and proteins such as ADIPOQ (ACRP30), FABP4 and/or PPARG for adipocytes; ACAN (AGC1), COL10A1, COMP, Sox9, IBSP (Sialoprotein II) and/or COL4 for chondrocytes; CDH5, KDR (VEGFR3) and/or PECAM1 for the general endothelium; DLL4, EFNB2 and/or NRP1 for the arterial endothelium; LYVE1 and/or PROX1 for the lymphatic endothelium; NR2F2 and/or NRP2 for the venous endothelium; KRT1, KRT10 and/or KRT14 for the keratinocyte epithelium; PMEL (SILV), TYR and/or TYRP1 for the melanocyte epithelium; MMP-9, α-SMA and/or Vimentin for the fibrocyte; BGLAP, COL2A1, IBSP, RANK-L, OCN, DMP-1, Sclerostin and/or MEPE for Osteoblasts/Osteocytes; CALCR and/or CTSK for Osteoclasts; ITGB4 and/or KRT19 for cholangiocytes; ALB, G6PC and/or TAT for Hepatocytes; CD79A for early B-cell development; CD3E and/or PTCRA for early T-cell development; CCR5, CXCR4 and/or EMR1 for macrophages; ITGAM for the monocytes; GALC and/or GFAP for glial cells; MAP2, NEFH and/or TUBB3 for mature neurons; CHAT for cholinergic neurons; TH for dopaminergic neurons; GAD1 and/or SLC32A1 for GABA neurons; SLC17A6 and/or SLC17A7 for glutamatergic neurons; ISL1 for motor neurons; MBP for oligodendrocytes; POU4F2 for ganglion cells; RLBP1 for Muller cells; PDE6B and/or RCVRN for photoreceptor cells; NPHS2 for podocytes; AQP1, CYP27B1 and/or MIOX for proximal tubule cells; AQP2 for collecting duct cells; UMOD for distal tubule cells; SFTPB, SFTPC and/or SFTPD for lung cells; MYH6, MYH7 and/or NPPA for cardiomyocytes; CAV3, MYH1, MYOD1, GATA4 and/or MLC1 for skeletal muscle cells; MYH11, SMTN and/or TAGLN for smooth muscle cells; GCG, MAFB and/or POU3F4 for alpha cells; INS, MAFA and/or SLC2A2 for beta cells; SST for delta cells; GHRL (Ghrelin, Obestatin) for epsilon cells; PPY for pancreatic polypeptide producing (PP) cells; and/or CPA1 for exocrine cells.

[0900] Consequently, any associations, combinations or compositions comprising a GFR-binding compound and an adhesion protein inhibitor as defined herein, which, when used to convert a neoplastic cell into a non-neoplastic cell and treat/prevent/diagnose a neoplastic disease, up-regulate (in particular, substantially increase) the expression of at least one differentiation genes and proteins such as ADIPOQ (ACRP30), FABP4, PPARG, ACAN (AGC1), COL10A1, COMP, Sox9, IBSP (Sialoprotein II), COL4, CDH5, KDR (VEGFR3), PECAM1, DLL4, EFNB2, NRP1, LYVE1, PROX1, NR2F2, NRP2, KRT1, KRT10, KRT14, PMEL (SILV), TYR, TYRP1, MMP-9, α-SMA, Vimentin, BGLAP, COL2A1, IBSP, RANK-L, OCN, DMP-1, Sclerostin, MEPE, CALCR, CTSK, ITGB4, KRT19, ALB, G6PC, TAT, CD79A, CD3E, PTCRA, CCR5, CXCR4, EMR1, ITGAM, GALC, GFAP, MAP2, NEFH, TUBB3, CHAT, TH, GAD1, SLC32A1, SLC17A6, SLC17A7, ISL1, MBP, POU4F2, RLBP1, PDE6B, RCVRN, NPHS2, AQP1, CYP27B1, MIOX, AQP2, UMOD, SFTPB, SFTPC, SFTPD, MYH6, MYH7, NPPA, CAV3, MYH1, MYOD1, GATA4, MLC1, MYH11, SMTN, TAGLN, GCG, MAFB, POU3F4, INS, MAFA, SLC2A2, SST, GHRL (Ghrelin, Obestatin), PPY and/or CPA1, in-vitro or in-vivo, shall be considered as being comprised within the scope of the present invention.

[0901] In one aspect, the present disclosure thus provides a pharmaceutical association, combination or (therapeutic, dermatologic, ophthalmologic, diagnostic, etc.) composition defined herein for use in a method of treating a neoplastic cell or a neoplastic disease by up-regulating (in particular, substantially increasing) the expression of differentiation genes and proteins such as ADIPOQ (ACRP30), FABP4, PPARG, ACAN (AGC1), COL10A1, COMP, Sox9, IBSP (Sialoprotein II), COL4, CDH5, KDR (VEGFR3), PECAM1, DLL4, EFNB2, NRP1, LYVE1, PROX1, NR2F2, NRP2, KRT1, KRT10, KRT14, PMEL (SILV), TYR, TYRP1, MMP-9, α-SMA, Vimentin, BGLAP, COL2A1, IBSP, RANK-L, OCN, DMP-1, Sclerostin, MEPE, CALCR, CTSK, ITGB4, KRT19, ALB, G6PC, TAT, CD79A, CD3E, PTCRA, CCR5, CXCR4, EMR1, ITGAM, GALC, GFAP, MAP2, NEFH, TUBB3, CHAT, TH, GAD1, SLC32A1, SLC17A6, SLC17A7, ISL1, MBP, POU4F2, RLBP1, PDE6B, RCVRN, NPHS2, AQP1, CYP27B1, MIOX, AQP2, UMOD, SFTPB, SFTPC, SFTPD, MYH6, MYH7, NPPA, CAV3, MYH1, MYOD1, GATA4, MLC1, MYH11, SMTN, TAGLN, GCG, MAFB, POU3F4, INS, MAFA, SLC2A2, SST, GHRL (Ghrelin, Obestatin), PPY and/or CPA1, in-vitro or in-vivo. Also provided is a method of treating a neoplastic cell or a neoplastic disease by up-regulating (in particular, substantially increasing) the expression of differentiation genes and proteins such as ADIPOQ (ACRP30), FABP4, PPARG, ACAN (AGC1), COL10A1, COMP, Sox9, IBSP (Sialoprotein II), COL4, CDH5, KDR (VEGFR3), PECAM1, DLL4, EFNB2, NRP1, LYVE1, PROX1, NR2F2, NRP2, KRT1, KRT10, KRT14, PMEL (SILV), TYR, TYRP1, MMP-9, α-SMA, Vimentin, BGLAP, COL2A1, IBSP, RANK-L, OCN, DMP-1, Sclerostin, MEPE, CALCR, CTSK, ITGB4, KRT19, ALB, G6PC, TAT, CD79A, CD3E, PTCRA, CCR5, CXCR4, EMR1, ITGAM, GALC, GFAP, MAP2, NEFH, TUBB3, CHAT, TH, GAD1, SLC32A1, SLC17A6, SLC17A7, ISL1, MBP, POU4F2, RLBP1, PDE6B, RCVRN, NPHS2, AQP1, CYP27B1, MIOX, AQP2, UMOD, SFTPB, SFTPC, SFTPD, MYH6, MYH7, NPPA, CAV3, MYH1, MYOD1, GATA4, MLC1, MYH11, SMTN, TAGLN, GCG, MAFB, POU3F4, INS, MAFA, SLC2A2, SST, GHRL (Ghrelin, Obestatin), PPY and/or CPA1, in-vitro or in-vivo, comprising administering to a subject in need thereof an effective amount of a pharmaceutical association, combination or (therapeutic, dermatologic, ophthalmologic, diagnostic, etc.) composition as defined herein.

[0902] Data have also shown (FIG. 5) that the administration or action of the pharmaceutical association, combination or composition as defined herein on neoplastic cells to be treated increased the phosphorylation of the protein p53.

[0903] Data have also shown (FIG. 5) that the administration or action of the pharmaceutical association, combination or composition as defined herein on neoplastic cells to be treated down-regulated (in particular, substantially decreased or suppressed) the phosphorylation of the protein pRb.

[0904] Data have also shown (FIG. 6) that the administration or action of the pharmaceutical association, combination or composition as defined herein on neoplastic cells to be treated down-regulated the protein Src.

[0905] Tumor protein p53, also known as p53, cellular tumor antigen p53, phosphoprotein p53, or tumor suppressor p53, is a protein that in humans is encoded by the TP53 gene. The p53 protein is involved in multicellular organisms, where it regulates the cell cycle and, thus, functions as a tumor suppressor, generally preventing neoplastic diseases such as cancers. As such, p53 has been described as “the guardian of the genome” because of its role in conserving stability by preventing genome mutation. TP53 is thus said to be a tumor suppressor gene.

[0906] Src is a non-receptor protein tyrosine kinase that plays a multitude of roles in cell signalling. Src is involved in the control of many functions, including cell adhesion, growth, movement and differentiation. Src is widely expressed in many cell types, and can have different locations within a cell. It appears that the subcellular location of Src can affect its function. Src can associate with cellular membranes, such as the plasma membrane, the perinuclear membrane and the endosomal membrane. At the plasma membrane, Src can transduce signals from a variety of receptors to internal signalling pathways that convey these signals to the nucleus, cytoskeleton and other cellular components. For example, Src can act through growth factor receptors to affect cell growth and proliferation. Within the nucleus, Src is thought to help regulate the cell cycle and cell division by its interactions with other proteins. For example, Src can interact with Sam68 to help regulate gene expression. In bone osteoclasts, Src acts to regulate the respiratory enzyme cytochrome C oxidase (Cox), where Src-induced phosphorylation of Cox is required for maintaining high levels of ATP to meet the cells' high energy requirements. Src can also be found in the cytoplasm, and between cells at adherens junctions, where it takes on different roles.

[0907] pRb (Retinoblastoma protein) is a tumor suppressor protein that is dysfunctional in several major cancers. One function of pRb is to prevent excessive cell growth by inhibiting cell cycle progression until a cell is ready to divide. It is also a recruiter of several chromatin remodeling enzymes such as methylases and acetylases. Rb restricts the cell's ability to replicate DNA by preventing its progression from the G1 (first gap phase) to S (synthesis phase) phase of the cell cycle. Rb binds and inhibits transcription factors of the E2F family, which are composed of dimers of an E2F protein and a dimerization partner (DP) protein. When Rb is bound to E2F, the complex acts as a growth suppressor and prevents progression through the cell cycle. Rb is phosphorylated to pRb by certain Cyclin Dependent Kinases (CDKs). pRb is described as being hyperphosphorylated and when in this state, it is unable to complex E2F and therefore, unable to restrict progression from the G1 phase to the S phase of the cell cycle. During the M-to-G1 transition, pRb is progressively dephosphorylated by PP1, returning to its growth-suppressive hypophosphorylated state Rb.

[0908] Consequently, any associations, combinations or compositions comprising a GFR-binding compound and an adhesion protein inhibitor as defined herein, which, when used to convert a neoplastic cell into a non-neoplastic cell and treat/prevent/diagnose a neoplastic disease, down-regulate (in particular, substantially decrease or suppress) the expression of genes and proteins p53 and/or Src, in-vitro or in-vivo, shall be considered as being comprised within the scope of the present invention.

[0909] In one aspect, the present disclosure thus provides a pharmaceutical association, combination or (therapeutic, dermatologic, ophthalmologic, diagnostic, etc.) composition defined herein for use in a method of treating a neoplastic cell or a neoplastic disease by down-regulating (in particular, substantially decreasing or suppressing) the expression of genes and proteins p53 and/or Src. Also provided is a method of treating a neoplastic cell or a neoplastic disease by down-regulating (in particular, substantially decreasing or suppressing) the expression of genes and proteins p53 and/or Src, comprising administering to a subject in need thereof an effective amount of a pharmaceutical association, combination or (therapeutic, dermatologic, ophthalmologic, diagnostic, etc.) composition as defined herein.

[0910] In one aspect, the present disclosure provides a pharmaceutical association, combination or (therapeutic, dermatologic, ophthalmologic, diagnostic, etc.) composition defined herein for use in a method of treating a neoplastic cell or a neoplastic disease by:
[0911] down-regulating (in particular, substantially reducing) the expression of FAK genes and proteins and/or MAP kinase; and/or
[0912] reducing (in particular, substantially reducing) the expression or activity of GTPase Ras, Rho (Rho, Rac, Cdc42); and/or
[0913] down-regulating (in particular, reducing, significantly reducing or suppressing) the Ras/MAP kinase, FAK/Src kinase and/or PIP2 signalling pathways; and/or
[0914] substantially inhibiting the formation of at least one of, in particular a plurality of, the protein complexes comprising at least one cyclin D and at least one CDK4 or CDK6; and/or
[0915] substantially inhibiting, down-regulating or dampening the gene expression or formation of at least one of, in particular a plurality of, the cyclin D proteins; and/or
[0916] down-regulating the expression of paxillin and/or (preferably and) up-regulating the expression of vinculin; and/or
[0917] up-regulating (in particular, substantially increasing) the expression of at least one of differentiation genes and proteins such as ADIPOQ (ACRP30), FABP4, PPARG, ACAN (AGC1), COL10A1, COMP, Sox9, IBSP (Sialoprotein II), COL4, CDH5, KDR (VEGFR3), PECAM1, DLL4, EFNB2, NRP1, LYVE1, PROX1, NR2F2, NRP2, KRT1, KRT10, KRT14, PMEL (SILV), TYR, TYRP1, MMP-9, α-SMA, Vimentin, BGLAP, COL2A1, IBSP, RANK-L, OCN, DMP-1, Sclerostin, MEPE, CALCR, CTSK, ITGB4, KRT19, ALB, G6PC, TAT, CD79A, CD3E, PTCRA, CCR5, CXCR4, EMR1, ITGAM, GALC, GFAP, MAP2, NEFH, TUBB3, CHAT, TH, GAD1, SLC32A1, SLC17A6, SLC17A7, ISL1, MBP, POU4F2, RLBP1, PDE6B, RCVRN, NPHS2, AQP1, CYP27B1, MIOX, AQP2, UMOD, SFTPB, SFTPC, SFTPD, MYH6, MYH7, NPPA, CAV3, MYH1, MYOD1, GATA4, MLC1, MYH11, SMTN, TAGLN, GCG, MAFB, POU3F4, INS, MAFA, SLC2A2, SST, GHRL (Ghrelin, Obestatin), PPY and/or CPA1; and/or
[0918] increasing the phosphorylation of protein p53; and/or
[0919] down-regulating (in particular, substantially decreasing or suppressing) the phosphorylation of the protein pRb; and/or
[0920] down-regulating (in particular, substantially decreasing or suppressing) the gene and protein expression of Src; and/or
[0921] not inducing the death of said neoplastic cell; and/or
[0922] dampening or arresting cell division or cell proliferation of said neoplastic cell.

[0923] In one example, the pharmaceutical association as defined herein may thus be an animal or mammal (preferably a human) anti-neoplastic disease agent (e.g. anti-cancer agent) which has demonstrated the ability to convert a neoplastic cell into a non-neoplastic cell in vitro, ex-vivo and/or in vivo and/or to protect a subject from a neoplastic disease, disorder, condition, pathology or any symptoms thereof.

[0924] In one aspect, the present disclosure also provides methods of converting a neoplastic cell into a non-neoplastic cell, said method comprising the administration to a cell, in-vitro, ex-vivo or in-vivo, of an effective amount of a pharmaceutical association, combination or composition as defined herein. In one example, said methods induce the differentiation of said neoplastic cell. In one example, said conversion is effected in less than 7 days, in less than 6 days, 5 days, 4 days, 3 days, 2 days, 24 hours or 18 hours, in particular in less than 24 hours. In other examples:
[0925] said neoplastic cell is a non-terminally differentiated cell and said methods comprise the differentiation of said non-terminally differentiated; and/or
[0926] said methods comprise the conversion and/or recoding of a neoplastic cell to induce and/or promote and/or improve self-healing and/or self-recovery thereof; and/or
[0927] said methods comprise restoring the ability of a neoplastic cell to undergo differentiation; and/or
[0928] said methods comprise converting and/or recoding a circulating or non-circulating neoplastic cell such as a metastatic or non-metastatic cancer cell, into a non-neoplastic cell; and/or
[0929] said methods comprise providing and/or producing and/or inducing the formation of a physiologically functional and/or healthy cell of the bone, chondrocyte, vascular, fibroblast, renal, retinal, neuronal, ligament, tendon, reproduction system, lung, blood, adipocyte cell lineage from a neoplastic cell; and/or
[0930] said methods comprise inducing and/or promoting and/or enhancing neoplastic cell differentiation; and/or
[0931] said methods comprise non-mutagenically protecting a subject from a neoplastic disease i.e. without modifying or altering the genome of the treated neoplastic cells; and/or
[0932] said methods comprise the extracellular treatment of a neoplastic disease, disorder, condition, pathology, or any symptoms thereof; and/or
[0933] said methods comprise down-regulating (in particular, substantially reducing) the expression of FAK genes and proteins and/or MAP kinase and/or reducing (in particular, substantially reducing) the expression or activity of GTPase Ras, Rho (Rho, Rac, Cdc42) in-vitro or in-vivo; and/or
[0934] said methods comprise restoring the cell adhesion checkpoint of said neoplastic cell; and/or
[0935] said methods comprise inhibiting the ECM binding of at least one integrin or one syndecan transmembrane proteins of said neoplastic cell; and/or
[0936] said methods comprise substantially inhibiting, down-regulating or dampening the gene expression or formation of at least one of, in particular a plurality of, the cyclin D proteins; and/or
[0937] said methods comprise substantially inhibiting the formation of at least one of, in particular a plurality of, the protein complexes comprising at least one cyclin D and at least one CDK4 or CDK6; and/or
[0938] said methods comprise not inducing the death of said neoplastic cell; and/or
[0939] said methods comprise dampening or arresting cell division and/or cell proliferation of said neoplastic cell; and/or
[0940] said methods comprise activating and/or promoting anti-mitogen activity and/or tumor suppressor pathways and/or anti-oncogenic activity in said neoplastic cell; and/or
[0941] said methods comprise down-regulating the gene expression of paxillin and/or (preferably and) up-regulating the gene expression or increasing turn-over of vinculin in-vitro or in-vivo; and/or
[0942] said methods comprise up-regulating (in particular, substantially increasing) the expression of differentiation genes and proteins such as ADIPOQ (ACRP30), FABP4, PPARG, ACAN (AGC1), COL10A1, COMP, Sox9, IBSP (Sialoprotein II), COL4, CDH5, KDR (VEGFR3), PECAM1, DLL4, EFNB2, NRP1, LYVE1, PROX1, NR2F2, NRP2, KRT1, KRT10, KRT14, PMEL (SILV), TYR, TYRP1, MMP-9, α-SMA, Vimentin, BGLAP, COL2A1, IBSP, RANK-L, OCN, DMP-1, Sclerostin, MEPE, CALCR, CTSK, ITGB4, KRT19, ALB, G6PC, TAT, CD79A, CD3E, PTCRA, CCR5, CXCR4, EMR1, ITGAM, GALC, GFAP, MAP2, NEFH, TUBB3, CHAT, TH, GAD1, SLC32A1, SLC17A6, SLC17A7, ISL1, MBP, POU4F2, RLBP1, PDE6B, RCVRN, NPHS2, AQP1, CYP27B1, MIOX, AQP2, UMOD, SFTPB, SFTPC, SFTPD, MYH6, MYH7, NPPA, CAV3, MYH1, MYOD1, GATA4, MLC1, MYH11, SMTN, TAGLN, GCG, MAFB, POU3F4, INS, MAFA, SLC2A2, SST, GHRL (Ghrelin, Obestatin), PPY and/or CPA1, in-vitro or in-vivo; and/or
[0943] said methods comprise down-regulating (in particular, substantially decreasing or suppressing) the gene expression of proteins p53, pRb and/or Src.

[0944] In one example, the pharmaceutical association as defined herein may thus be an animal or mammal (preferably a human) anti-neoplastic disease agent (e.g. anti-cancer agent) which has demonstrated the ability to convert a neoplastic cell into a non-neoplastic cell in vitro, ex-vivo and/or in vivo and/or to protect a subject from a neoplastic disease, disorder, condition, pathology or any symptoms thereof.

[0945] In one example, said administration induces the quiescence of the neoplastic cell. In one example, said administration prevents, reduces or suppresses the cell division and/or cell proliferation of said neoplastic cell. In one example, said administration regulates or promotes anti-mitogen activity and/or tumor suppressor activity and/or anti-oncogenic activity in said neoplastic cell. In one example, said method is cytostatic for the treated cell. In one example, said method is not cytotoxic for the treated cell. In one example, said method is non-mutagenic.

[0946] In one aspect, the present disclosure provides a method of producing a physiologically functional and healthy cell, comprising the administration in-vitro, ex-vivo or in-vivo to a neoplastic cell an effective amount of a pharmaceutical association or composition as defined herein and wherein said physiologically functional and healthy cell is selected from the group consisting of an osteoblast, osteocyte, chondroblast, chondrocyte, neuroblast, neurocyte, Sertoli cells, Leydig cell, Germ cell, Myoblast, Myocyte, keratinocyte, endothelial cells, angioblast, fibroblast, fibrocyte, podocyte.

[0947] In one aspect, the present disclosure provides a method of converting a cell “X” into a cell “Y”, said method comprising the administration to a neoplastic cell of an effective amount of a pharmaceutical association, combination or composition as defined herein, wherein cell X is a neoplastic cell selected from the group consisting of:
[0948] a. a metastatic or non-metastatic neoplastic cell;
[0949] b. a cell comprising at least one alteration, mutation and/or deregulation of at least one tumour suppressor gene or of at least one of their gene-encoded product (such as for example the Rb and/or P53 genes or gene products);
[0950] c. a cell comprising at least one alteration, mutation and/or deregulation of at least one of proto-oncogene or of at least one of their gene-encoded product (such as for example Src-tyrosine kinase- and/or Ras-small GTPase);
[0951] d. a cell having an impaired DNA repair mechanism (such as for example BRCA1 and BRCA2);
[0952] e. a cell comprising at least one alteration, mutation and/or deregulation of at least one mitogen and/or anti-mitogen gene or at least one of their gene-encoded products (such as for example TGF-beta);
[0953] f. a cell having an defective, altered or impaired cell cycle or cell cycle control, wherein said defective cell cycle is due to either at least one alteration, mutation and/or deregulation of at least one cell cycle gene or gene-encoded product (for example Cyclin E1, Cyclin D1, CDK 4/6) at least one alteration, mutation and/or deregulation of at least one cell cycle checkpoint or diminution or reduction of a checkpoint sensibility and/or responsiveness;
[0954] g. a stem cell-like cell comprising a Stro-1 positive marker and having multi-potency;
[0955] h. a cell comprising at least one specific differentiation marker such as ADIPOQ (ACRP30), FABP4, PPARG, ACAN (AGC1), COL10A1, COMP, Sox9, IBSP (Sialoprotein II), COL4, CDH5, KDR (VEGFR3), PECAM1, DLL4, EFNB2, NRP1, LYVE1, PROX1, NR2F2, NRP2, KRT1, KRT10, KRT14, PMEL (SILV), TYR, TYRP1, MMP-9, α-SMA, Vimentin, BGLAP, COL2A1, IBSP, RANK-L, OCN, DMP-1, Sclerostin, MEPE, CALCR, CTSK, ITGB4, KRT19, ALB, G6PC, TAT, CD79A, CD3E, PTCRA, CCR5, CXCR4, EMR1, ITGAM, GALC, GFAP, MAP2, NEFH, TUBB3, CHAT, TH, GAD1, SLC32A1, SLC17A6, SLC17A7, ISL1, MBP, POU4F2, RLBP1, PDE6B, RCVRN, NPHS2, AQP1, CYP27B1, MIOX, AQP2, UMOD, SFTPB, SFTPC, SFTPD, MYH6, MYH7, NPPA, CAV3, MYH1, MYOD1, GATA4, MLC1, MYH11, SMTN, TAGLN, GCG, MAFB, POU3F4, INS, MAFA, SLC2A2, SST, GHRL (Ghrelin, Obestatin), PPY and/or CPA1;
[0956] i. a cell having increased cytoplasmic and nuclear stiffness;
[0957] j. a cell having high cytoskeleton dynamics; and
[0958] k. any combination thereof;

[0959] and wherein cell Y is a non-neoplastic cell selected from the group consisting of:
[0960] a. a cell in a terminal differentiation state;
[0961] b. a cell in a non-terminal differentiation state and more differentiated than the X cell;
[0962] c. a cell having a physiologically normal proliferation;
[0963] d. a physiologically functional cell having healthy or normal genes expression and proteins activity.

[0964] In one aspect, the present disclosure provides methods to activate a growth factor receptor present on the surface of a neoplastic cell, said method comprising administering to said neoplastic cell an effective amount of a pharmaceutical association, combination or composition as defined herein, wherein administering said pharmaceutical association, combination or composition activates the growth factor receptor present on the surface of the neoplastic cell.

[0965] In one aspect, the present disclosure provides methods of delivering a pharmaceutical composition in-vitro, ex-vivo or in-vivo to a neoplastic cell, comprising the contacting of said neoplastic cell with said pharmaceutical composition, and wherein said pharmaceutical composition comprises a GFR-binding compound and an adhesion protein inhibitor as defined herein.

[0966] In one aspect, the present disclosure provides methods of administering a pharmaceutical association, combination or composition comprising a GFR-binding compound and an adhesion protein inhibitor to a subject comprising the contacting of at least one body part of said subject with said pharmaceutical association, combination or composition.

[0967] Protected from a disease, condition, disorder or pathology refers to the treatment of the underlying cause of the disease, condition, disorder or pathology as well as reducing the symptoms of the disease, condition, disorder or pathology; and/or reducing the occurrence of the disease, condition, disorder or pathology; and/or reducing the severity of the disease, condition, disorder or pathology. Protecting a patient can refer to the ability of a therapeutic composition of the present invention, when administered to a patient, to prevent a disease, condition, disorder or pathology from occurring and/or to cure or to alleviate disease, condition, disorder or pathology symptoms, signs or causes. As such, to protect a patient from a disease, condition, disorder or pathology includes both preventing disease, condition, disorder or pathology occurrence (prophylactic treatment) and treating a patient that has a disease, condition, disorder or pathology or that is experiencing initial symptoms or later stage symptoms of a disease, condition, disorder or pathology (therapeutic treatment).

[0968] Treating: As used herein, unless indicated otherwise or contradictory in context, the term “treating” or “treatment” refers to partially or completely alleviating, ameliorating, improving, relieving, delaying onset of, inhibiting progression of, reducing severity of, and/or reducing incidence of one or more symptoms or features of a particular disease, disorder, pathology and/or condition. For example, in certain embodiments, “treating” or “treatment of” cancer may refer to inhibiting survival, growth, and/or spread of a tumor. Treatment may be administered to a subject who does not exhibit signs of a disease, disorder, and/or condition and/or to a subject who exhibits only early signs of a disease, disorder, pathology and/or condition for the purpose of decreasing the risk of developing pathology associated with the disease, disorder, and/or condition.

[0969] As used herein, “treating a neoplastic cell” is used interchangeably with the expression “converting a neoplastic cell into a non-neoplastic cell”.

[0970] Preventing: As used herein, unless indicated otherwise or contradictory in context, the term “preventing” refers to partially or completely delaying onset of an infection, disease, disorder and/or condition; partially or completely delaying onset of one or more symptoms, features, or clinical manifestations of a particular infection, disease, disorder, and/or condition; partially or completely delaying onset of one or more symptoms, features, or manifestations of a particular infection, disease, disorder, and/or condition; partially or completely delaying progression from an infection, a particular disease, disorder and/or condition; and/or decreasing the risk of developing pathology associated with the infection, the disease, disorder, and/or condition.

[0971] Substantially diminished, reduced or inhibited: As used herein, unless indicated otherwise or contradictory in context, the term “substantially diminished” or “substantially inhibited” as it relates to cellular activity and/or function, protein expression or complexes formation, refers to a diminution or reduction in activity or function, in comparison with the activity and/or function of a normal or healthy cell (e.g. a non-neoplastic cell), of 1%, 2%, 3%, 4%, 5%, 6%, 7%, 8%, 9%, 10%, 11%, 12%, 13%, 14%, 15%, 16%, 17%, 18%, 19%, 20%, 21%, 22%, 23%, 24%, 25%, 26%, 27%, 28%, 29%, 30%, 31%, 32%, 33%, 34%, 35%, 36%, 37%, 38%, 39%, 40%, 41%, 42%, 43%, 44%, 45%, 46%, 47%, 48%, 49%, 50%, 51%, 52%, 53%, 54%, 55%, 56%, 57%, 58%, 59%, 60%, 61%, 62%, 63%, 64%, 65%, 66%, 67%, 68%, 69%, 70%, 71%, 72%, 73%, 74%, 75%, 76%, 77%, 78%, 79%, 80%, 81%, 82%, 83%, 84%, 85%, 86%, 87%, 88%, 89%, 90%, 91%, 92%, 93%, 94%, 95%, 96%, 97%, 98%, or 99%, in particular of 50% to 99%, 55% to 99%, 60% to 99%, 65% to 99%, 70% to 99%, 75% to 99%, 80% to 99%, 85% to 99% or 90% to 99%. The same applies conversely to the term “substantially increased”.

[0972] Disease: As used herein, unless indicated otherwise or contradictory in context, the term “disease” refers to any deviation from the normal health of a patient and includes a state when disease symptoms are present, as well as conditions in which a deviation has occurred, but symptoms are not yet manifested. A defective, ill-functioning, malfunctioning, dysfunctioning, and/or deleterious cell, such as e.g. a neoplastic cell, may be a cause of a disease. The same applies to “condition”, “disorder” and “pathology”.

[0973] Neoplasm: As used herein, unless indicated otherwise or contradictory in context, the term “neoplasm” (sometimes also referred to as tumor or tumour) refers to an abnormal growth of tissue. This abnormal growth usually but not always forms a mass. The World Health Organization classifies neoplasms into four main groups: benign neoplasms, in situ neoplasms, malignant neoplasms, and neoplasms of uncertain or unknown behavior. A malignant neoplasm is a cancer.

[0974] Neoplastic cell: As used herein, unless indicated otherwise or contradictory in context, the term “neoplastic cell” refers to a cell with abnormal proliferation, generally due the presence of a defective cell cycle, as well as cells which may become neoplastic such as cancer stem cell for which a definition is given in “Refining the role for adult stem cells as cancer cells of origin”, White A C, Lowry W E, Trends Cell Biol. 2014 Sep. 18. pii: S0962-8924(14)00145-7, and “review article Stem cells, cancer, and cancer stem cells”, Tannishtha Reya et al., Nature 414, 105-111 (1 Nov. 2001), which are incorporated herein by reference in their entirety.

[0975] Neoplastic disease: As used herein, unless indicated otherwise or contradictory in context, the term “neoplastic disease”, used interchangeably with “neoplastic conditions”, “neoplastic disorder” and “neoplastic pathology”, refers to a disease associated with an abnormal growth of tissue, generally due to the presence of a neoplastic cell.

[0976] Circulating: As used herein, unless indicated otherwise or contradictory in context, the term “circulating”, when used in relation to a neoplastic cell, refers to a neoplastic cell that has detached itself from a primary tumor site and migrates to a different location in the body to become a metastatic tumor.

[0977] Cancers: As used herein, unless indicated otherwise or contradictory in context, the term “cancer” refers to a malign form of neoplasm which includes sarcomas, carcinomas, lymphomas, leukemias (or leukaemias), teratomas, mesotheliomas, myelomas and germinomas. Cancers include, but are not limited to, Acute lymphoblastic leukaemia (ALL), Acute myeloid leukaemia, Adrenocortical carcinoma, AIDS-related cancers, AIDS-related lymphoma, Anal cancer, Appendix cancer, Astrocytoma, childhood cerebellar or cerebral, Basal-cell carcinoma, Bile duct cancer, Bladder cancer, Bone tumor, osteosarcoma/malignant fibrous histiocytoma, Brainstem glioma, Brain cancer, Breast cancer, Bronchial adenomas/carcinoids, Burkitt's lymphoma, Carcinoid tumor, Central nervous system lymphoma, Cerebellar astrocytoma, Cerebral astrocytoma/malignant glioma, Cervical cancer, Childhood cancers, Chronic bronchitis, Chronic lymphocytic leukaemia, Chronic myelogenous leukaemia, Chronic myeloproliferative disorders, Chronic obstructive pulmonary disease (COPD), Colon cancer, Cutaneous T-cell lymphoma, Desmoplastic small round cell tumor, Emphysema, Endometrial cancer, Ependymoma, Esophageal cancer, Ewing's sarcoma in the Ewing family of tumors, Extracranial germ cell tumor, Extragonadal germ cell tumor, Extrahepatic bile duct cancer, Eye cancer, Gallbladder cancer, Gastric (stomach) cancer, Gastrointestinal carcinoid tumor, Gastrointestinal stromal tumor (GIST), Germ cell tumor: extracranial, extragonadal, or ovarian, Gestational trophoblastic tumor, Glioma of the brain stem, Glioma, Gastric carcinoid, Hairy cell leukemia, Head and neck cancer, Heart cancer, Hepatocellular (liver) cancer, Hodgkin lymphoma, Hypopharyngeal cancer, Hypothalamic and visual pathway glioma, childhood, Intraocular melanoma, Islet cell carcinoma (endocrine pancreas), Kaposi sarcoma, Kidney cancer (renal cell cancer), Laryngeal cancer, Leukemias, acute lymphoblastic leukemia, acute myeloid leukemia, chronic lymphocytic leukemia, chronic myelogenous leukemia, hairy cell Leukemia, Lip and oral cavity cancer, Liposarcoma, Liver cancer, Lung cancer, AIDS-related lymphoma, Burkitt lymphoma, cutaneous T-Cell lymphoma, Hodgkin lymphoma, Non-Hodgkin lymphoma, primary central nervous system lymphoma, Macroglobulinemia, Male breast cancer, Malignant fibrous histiocytoma of bone/osteosarcoma, Medulloblastoma, intraocular (eye) Melanoma, Merkel cell cancer, Mesothelioma, Metastatic squamous neck cancer with occult primary, Mouth cancer, Multiple endocrine neoplasia syndrome, Multiple myeloma/plasma cell neoplasm, Mycosis fungoides, Myelodysplastic syndromes, Myelodysplastic/myeloproliferative diseases, multiple Myeloma, Myeloproliferative disorders, Nasal cavity and paranasal sinus cancer, Nasopharyngeal carcinoma, Neuroblastoma, Oral cancer, Oropharyngeal cancer, Osteosarcoma/malignant fibrous histiocytoma of bone, Ovarian cancer, Ovarian epithelial cancer, Ovarian germ cell tumor, Ovarian low malignant potential tumor, Pancreatic cancer, Pancreatic cancer, islet cell Paranasal sinus and nasal cavity cancer, Parathyroid cancer, Penile cancer, Pharyngeal cancer, Pheochromocytoma, Pineal astrocytoma, Pineal germinoma, Pineoblastoma and supratentorial primitive neuroectodermal tumors, Pituitary adenoma, Plasma cell neoplasia/Multiple myeloma, Pleuropulmonary blastoma, Primary central nervous system lymphoma, Prostate cancer, Rectal cancer, Renal cell carcinoma (kidney cancer), Renal pelvis and ureter, transitional cell cancer, Retinoblastoma, Rhabdomyosarcoma, Salivary gland cancer, Ewing family of tumors Sarcoma, Kaposi Sarcoma, soft tissue Sarcoma, uterine Sarcoma, Sezary syndrome, Skin cancer (non-melanoma), Skin cancer (melanoma), Merkel cell Skin carcinoma, Small intestine cancer, Soft tissue sarcoma, metastatic squamous neck cancer with occult primary, Stomach cancer, Supratentorial primitive neuroectodermal tumor, cutaneous T-Cell lymphoma, Testicular cancer, Throat cancer, Thymoma and thymic carcinoma, Thyroid cancer, Transitional cell cancer of the renal pelvis and ureter, Trophoblastic tumor, transitional cell cancer, Urethral cancer, Uterine cancer, Uterine sarcoma, Vaginal cancer, Visual pathway and hypothalamic glioma, Vulvar cancer, Waldenström macroglobulinemia, and Wilms tumor (kidney cancer). In certain embodiments, cancers that may be treated using the recoding therapy disclosed herein are selected from the group consisting of sarcomas such as Osteosarcoma, Osteoma, Chondrosarcoma, Chondroma, Leiomyosarcoma, Leiomyoma, Rhabdomyosarcoma, Rhabdomyoma, Mesothelioma, Fibrosarcoma, Fibroma, Malignant Histiocytoma, Hisitocytoma, Angiosarcoma, Hemangiosarcoma, Hemangioma, Hemangiopericytoma, Lymphangiosarcoma, Lymphangioma, Liposarcoma, Lipid Cell Tumor, Lipoma, Myxosarcoma, Chordoma, Cystosarcoma Phylloides, Fibroadenoma, Seminoma, Dysgerminoma, Sertoli-Leydig Cell Tumor, Arrhenoblastoma, Granulose-Theca Cell Tumor, Hilar Cell Tumor, Prostate Cancer, Prostatic Hypertrophy, Wilms Tumor, Melanoma, Nevus, Neurofibrosarcoma, Glioma, Anaplastic Glioma, Glioblastoma, Neuroblastoma, Medulloblastoma, Ganglioneuroma, Malignant meningioma, Meningioma, Malignant Schwannoma, Schwannoma, Neurilemmoma, Neurofibroma and Mesenchymous Tumor; Carcinomas such as Squamous Cell Carcinoma, Merkel Cell Neoplasm, Epidermoid Carcinoma, malignant Skin Adnexal Tumor, Adenocarcinoma, Hepatocellular Carcinoma, Renal Cell Carcinoma, Choriocarcinoma, Hypernephroma, Cholangiocarcinoma, Transitional Cell Carcinoma, Seminoma, Embryonal Cell Carcinoma, Papilloma, Seborrheic Keratosis, Skin Adnexal Tumors, Hepatoma, Adenoma, Hepatic Adenoma, Renal Tubular Adenoma, Bile Duct Adenoma, Transitional Cell Papilloma, Hydatidiform Mole, Parathyroid Carcinoma, Parathyroid Adenoma, Medullary Carcinoma of Thyroid, C Cell Hyperplasia, Malignant Pheochromocytoma, Pheochromocytoma, Islet Cell Carcinoma, Islet Cell Adenoma, Insulinoma, Gastrinoma, Malignant Carcinoid, Carcinoid, Malignant Paraganglioma, Chemodectoma and Paraganglioma; Myelomas; Leukemias such as Myelogenous Leukemia, Lymphatic Leukemia, Policythemia, Aleukemic Leukemia, Preleukemia and Myeloproliferative Disorders; Lymphoma such as Myeloma, Hodgkin Lymphoma, Non-Hodgkin Lymphoma, Plasmacytoma and Plasmacytosis; Adenosquamous Carcinoma, Mesodermal Tumor, Carcinosarcoma and Teratocarcinoma.

[0978] Symptoms of neoplastic diseases: In one example, the present invention treats or alleviates at least one symptom selected from Angina, Bradypnea, Breathing difficulties, Gradual vision change in both eyes, Gradual vision changes in one eye, Head symptoms, Heartburn, Muscle symptoms, Nerve symptoms, Perforated gastric ulcer, Perforated ulcer, Respirations, shallow, Sexual symptoms, Weight loss, Oesophagus symptoms, Weight symptoms, Anaemia, Bad breath, Breath odors, Burning feet, Burning Legs, Cleft lip with or without cleft palate in children, Communication symptoms, Diarrhea, Dyspepsia, Easily fatigued, Enlarged liver, Face symptoms, Foot pain, Gastritis, Gastrooesophageal reflux in pregnancy, Glossitis, Hairy Tongue, Hyperlipidaemia, Hypertriglyceridemia, Impotence, Lack of energy, Lag in breathing, Male infertility, Meniere's disease, Movement symptoms, Musculoskeletal symptoms, Night sweats in children, Non-respiratory causes of shallow respiration, Raised ambulatory 24 hr pH monitoring, Rapid heartbeat, Respiratory lag, Sleep symptoms, Sleeplessness, Speech symptoms, Sweat symptoms, Trauma-related symptoms, Voice symptoms, Vomiting, White tongue, Abdominal symptoms, Abnormal blood test symptoms, Acute reflux-like regurgitation in pregnancy, Acute reflux-like symptoms in pregnancy, Acute reflux-like vomiting in pregnancy, Acute stomach ulcer-like symptoms in pregnancy, Birth symptoms, Blanching in the fingers, Bleeding symptoms, Blood symptoms, Blood vessel damage, Chronic pain in multiple muscles, Digestive symptoms, Elevated blood pressure in pregnancy, Episodic arterial vasospasm, Female infertility, Female reproductive symptoms, Fertility symptoms, Heart enlargement, Hiatus hernia, Hiatus hernia related to chronic digestive disorders, High blood pressure, Hypertension-like symptoms in pregnancy, Impaired myocardial contractility, Increased Systolic pressure, Infection, Infertility, Intermittent claudication, Intermittent claudication of both lower limbs, Intermittent claudication of one lower limb, Intermittent pain of the lower limb, Lower abdominal symptoms, Lower blood pressure in the legs than in the arms, Mouth symptoms, Mycocardial ischemia, Noncompliance, Occlusion of renal arteries, Pain, Peripheral arterial trauma, Poor appetite, Poor wound healing, Pregnancy symptoms, Pulsatile Abdominal swelling, Red blood cell symptoms, Reflux-like symptoms, Respiratory symptoms, Sensory symptoms, Severe chronic pain in multiple bones, Sore throat, Sweating, Throat symptoms, Urinary incontinence, Venous insufficiency, Women's health symptoms, Birth defects, Eating symptoms, 1 litre of sweat per hour, Aberrant behaviour in pregnancy, Abnormal eye movements, Abnormal Liver Function Tests in Pregnancy, Abnormal thinking in pregnancy, Absenteeism, Accentuated fall in systolic pressure, Acidosis, Action tremor, Acute epilepsy-like symptoms, Acute forgetfulness in pregnancy, Acute hemorrhagic pancreatitis, Acute intermittent forgetfulness in pregnancy, Acute onset of daytime sleepiness, Acute onset of daytime sleepiness in adults, Acute onset of daytime sleepiness in the elderly, Acute pancreatitis, Addiction symptoms, Aggression, Alcohol abuse, Alcohol breath odor, Alcohol use, Altered bladder habits in pregnancy, Altered mental state, Altered vital signs, Anxiety disorder in pregnancy, Anxiety in pregnancy, Apprehension in pregnancy, Arrhythmia, Arrhythmias, Atrial fibrillation, Balance symptoms, Behavior problems at school, Behavior problems at work, Behavior problems in adults, Behavior problems in children, Behavior problems in teens, Behavioral symptoms, Behaviour changes in pregnancy, Blackouts, Cerebellar ataxia, Chronic Diarrhea, Chronic orthostatic hypotension, Cleft palate in children, Clumsiness, CNS depression in children, Cognitive impairment, Coma, Confusion, Confusion in children, Coordination problems, De-personalization, Decreased level of consciousness, Deep stupor, Dehydration, Delayed ejaculation, Delirium, Delusions, Dementia, Depressed mental status, Depressive symptoms, Diabetic retinopathy, Diaphoresis of the feet, Diaphoresis of the forehead, Diaphoresis of the palms, Diaphoresis of the soles, Difficulty concentrating in adults, Disoriented state, Diuresis, Dramatic fall in blood pressure, Drowsiness, Drug abuse, Drug withdrawal causing new-onset seizures, Drugs, Drugs causing diarrhea, Drugs causing macrocytosis, Drugs causing persistent hypoglycemia, Drugs causing persistent hypoglycemia in adolescents, Drugs causing persistent hypoglycemia in children, Drugs causing persistent hypoglycemia in infants, Dysphagia due to esophagitis, Emotional symptoms, Energy symptoms, Epilepsy-like symptoms, Episodic Diaphoresis, Episodic Diaphoresis as in case of diabetes mellitus, Euphoria, Excessive diaphoresis, Eye symptoms, Fainting, Fainting episodes similar as in pulmonary hypertension, Falls, Fatigue, Feeling the heartbeat, Flushing, Forgetfulness, Forgetfulness in pregnancy, Frequency of urination in pregnancy, Frequent urination, Frequent urination in pregnancy, Generalised diaphoresis, Generalised diaphoresis with heat loss via evaporation, Hallucinations, Headache, Heart arrhythmia, Heart arrhythmias, Heart flutters, High ALP, High ALT, High AST, Hyperosmolarity, Hypoperfusion state, Hypothermia, Hypothermic attack, Imbalance, Impaired circulation, Inadequate intravascular pressure, Inattention, Inattention symptoms, Increased bilirubin, Increased GGT, Increased prothrombin time, Increased sweating, Intercourse symptoms, Intermittent diaphoresis, Intermittent epilepsy-like symptoms, Intermittent seizures in early childhood, Involuntary tonic movements, Irregular heartbeat, Irritability, Jaundice in pregnancy, Level of consciousness symptoms, Liver tenderness in pregnancy, Low albumin, Low blood platelet level in pregnancy, Low blood pressure, Low blood sugar, Low temperature, Major depression in pregnancy, Male impotence, Memory disturbances, Memory Disturbances in pregnancy, Memory loss in pregnancy, Memory symptoms, Memory symptoms in pregnancy, Mental changes in pregnancy, Mental depression, Mental depression in pregnancy, Mental problems, Mental problems in pregnancy, Mild depression in pregnancy, Mild depression-like symptoms in pregnancy, Mild personality changes, Moderate depression in pregnancy, Mood swings, Muscle pain, Muscle weakness, Myoclonus, Nerve damage, Nervousness, Nervousness in pregnancy, Neuromuscular irritability, Neuromuscular irritability of lower limbs, Neuropathy, Night time urination in pregnancy, Night urination in pregnancy, Nocturia in pregnancy, Numbness in Both Feet, Numbness in one foot, Nystagmus, Ocular myokymia, Orthostatic hypotension, Ototoxic medications, Palpitations, Pancreatitis, Paresthesias, Penile Burning Sensation, Persistent painful erection, Personality change, Personality symptoms, Phobia, Progressive mental deterioration, Prolonged exposure to cold, Psychiatric symptom, Pulse irregularity in pregnancy, Red face, Reduced immune response, Reduced intravascular pressure, Reduced sperm count, Retinopathy, School problems, Seizures, Seizures in infants and early childhood, Self-esteem symptoms, Severe epilepsy-like symptoms, Sexual dysfunction in pregnancy, Short-term memory loss, Signs of circulatory collapse, Signs of circulatory collapse as seen in intestinal hemorrhage, Sleeping problems, Slurred speech, Social problems, Society problems, Sole numbness, Standing symptoms, Stupor, Subfertility, Substance abuse causing school underachievement and academic failure, Substances of abuse causing delirium, Sudden onset of confusion in children, Syncopal episode, Thigh Burning Sensation, Thrombocytopenia, Thrombocytopenia in pregnancy, Tingling in Both Feet, Tingling in both hands, Tingling in one foot, Tingling in one hand, Tonic-clonic seizure, Toxins causing vomiting, Tremor, Unusual body odor in children, Urinary burning, Urinary urgency, Urine retention, Vascular collapse, Vertigo, Violent behaviour, Walking symptoms, Weight loss in pregnancy, Abnormal uterine bleeding, Abortion, Abruptio Placentae in Pregnancy, Abscessed teeth, Acid Reflux in pregnancy, Acquired mental retardation, Acute acid reflux into mouth during pregnancy, Acute attack of asthma, Acute cerebral infarct, Acute seasonal asthma-like symptoms, Aphthous Ulcer, Arm burning sensation, Arm coldness, Arm infection, Arm inflammation, Arm numbness, Arm paresthesia, Arm redness, Arm sensitive, Arm spasm, Arm swelling, Atelectasis, Biceps burning sensation, Biceps cold, Biceps infection, Biceps inflammation, Biceps numb, Biceps redness, Biceps spasm, Biceps swelling, Biceps tingling, Bilateral cleft lip and palate, Bilateral complete cleft lip, Bilateral stroke, Black hairy tongue, Bladder symptoms, Blood clots, Blood lead concentration, Blood pressure symptoms, Blood vessel symptoms, Blue lips, Bone changes, Breath sound symptoms, Breath symptoms, Bronchial cancer, Bronchitis, Brown nails, Cancer-related symptoms, Cardiovascular symptoms, Cervix symptoms, Chronic bronchitis, Chronic cough, Chronic cough in adolescents, Circulation symptoms, Claudication, Cluster headache, Constant leg pain, Coracobrachialis infection, Coracobrachialis redness, Coracobrachialis swelling, Cough, Cramping leg pain, Cramping pain in both legs, Dark spots on teeth, Darkened tongue, Death, Death-related symptoms, Decreased salivary function, Digit burning sensation, Digit cold, Digit infection, Digit inflammation, Digit numb, Digit redness, Digit sensitive, Digit spasm, Digit swelling, Digit tingling, Disc herniation, Disc prolapse, Discolored teeth in children, Dry cough, Dry Gangrene, Dry mucous membrane as in case of Sjogren's syndrome, Dry skin, Electrocardiogram changes, Eructation, Exercise symptoms, Female genital symptoms, Female sexual symptoms, Femur burning sensation, Femur numb, Femur tingling, Fetal symptoms, Fibula burning sensation, Fibula numb, Fibula tingling, Finger burning sensation, Finger pulp burning sensation, Fingernail burning sensation, Fingers burning sensation, Fingers cold, Fingers infection, Fingers inflammation, Fingers numb, Fingers redness, Fingers sensitive, Fingers spasm, Fingers swelling, Fingers tingling, Forearm burning sensation, Forearm cold, Forearm infection, Forearm inflammation, Forearm numb, Forearm redness, Forearm sensitive, Forearm spasm, Forearm swelling, Forearm tingling, Foul mouth odour, Genital symptoms, Growth symptoms, Heart damage, Heart disease, Heart rhythm symptoms, Heart symptoms, Heartburn after eating in pregnancy, Heartburn after exercise in pregnancy, Heartburn in pregnancy, Heartburn pain resistant to treatment in pregnancy, Heartburn that worsens if lying down after eating in pregnancy, Heartburn unrelated to eating in pregnancy, Heartburn with acid reflux in pregnancy, Heartburn without reflux in pregnancy, Herniated disk, Hiccups, High lipoprotein level, Hoarse, Humerus burning sensation, Humerus numb, Humerus tingling, Hypoxia in pregnancy, Increased capillary refill time, Increased secretions in the lung, Indigestion in pregnancy, Infant symptoms, Inflammatory symptoms, Irregular rhythm, Kidney symptoms, Knee joint burning sensation, Knee joint cold, Knee joint numb, Knee joint sensitive, Knee joint tingling, Kneecap burning sensation, Kneecap cold, and any combinations thereof.

[0979] In one aspect, the present disclosure provides methods to activate, promote, support, improve, or increase the activity of a growth factor receptor present in, on the surface of a neoplastic cell such that the neoplastic cell in converted into a non-neoplastic cell and/or a subject carrying said cell is protected from a neoplastic disease, said methods optionally comprising the administration of a pharmaceutical association as defined herein.

[0980] In one aspect, the present disclosure provides methods to activate, promote, support, improve, or increase the tumor suppressor activity of proteins p53 and/or pRb (retinoblastoma protein) in a neoplastic cell such that the neoplastic cell in converted into a non-neoplastic cell and/or a subject carrying said cell is protected from a neoplastic disease, said methods comprising the administration of a pharmaceutical association as defined herein.

[0981] In one aspect, the present disclosure provides methods to convert a neoplastic cell (e.g. a cancer cell) into a non-neoplastic cell (e.g. a non-cancerous cell) and/or to protect a subject carrying this cell from a neoplastic disease, disorder, condition, pathology or at least one symptom thereof, which involves dampening or inhibiting cell division and/or regulating, re-establishing or restoring a cell adhesion checkpoint and/or inducing differentiation of said neoplastic cell.

[0982] In one aspect, the present disclosure provides a GFR-binding compound as defined herein, for use in the prevention, diagnostic and/or treatment of a neoplastic disease in combination with at least one adhesion protein inhibitor as defined herein.

[0983] In one aspect, the present disclosure provides an adhesion protein inhibitor, for use in the prevention, diagnostic and/or treatment of a neoplastic disease in combination with at least one growth factor receptor-binding compound as defined herein.

[0984] XII. Diagnostic Methods

[0985] In one aspect, the present disclosure provides methods of identifying, diagnosing, and optionally classifying subjects on these bases, which may include clinical diagnosis, biomarker levels, and other methods known in the art.

[0986] In one aspect, the present disclosure provides a pharmaceutical association or composition as defined herein for use in a diagnostic method of a neoplastic disease (e.g. a cancer). In one example, such a diagnostic method comprises the detection of a cancer using a method described in US patent application No. 2002/0159986 A1, which is incorporated herein by reference in its entirety.

[0987] In one aspect, the present disclosure provides a diagnostic method for diagnosing of a neoplastic disease or condition comprising the provision of a pharmaceutical association or composition as defined herein, and the contacting or administration of said pharmaceutical association or composition with a body part of a subject to be diagnosed.

[0988] A method for the diagnosis of cancer in a patient, comprising obtaining a biological sample from a patient and apply fluorescent and/or radiolabeled GFR binding compounds, wherein high localisation of these compounds indicates cancer in the patient.

[0989] In one aspect, the present disclosure provides methods of determining the effectiveness of a pharmaceutical association, combination or composition as defined herein for converting a neoplastic cell into a non-neoplastic cell and/or for treating a neoplastic disease or at least one symptom thereof, comprising the administration of said pharmaceutical association to a cell; the measurement of the expression of specific differentiation and/or cancerous markers as defined herein in the cell; the comparison of the expression of said specific differentiation and/or cancerous markers in the cell to the expression of said specific differentiation and/or cancerous markers in a cell treated with a reference (or control) pharmaceutical association, compound or solvent; and determining the effectiveness of the pharmaceutical association or composition relative to the reference pharmaceutical association or compound.

[0990] XIII. Screening Methods

[0991] In one aspect, the present disclosure provides a screening method for selecting a GFR-binding compound having the ability, after being associated or combined with an adhesion protein inhibitor as defined herein (thus forming a pharmaceutical association or combination as defined herein), to convert or recode a neoplastic cell into a non-neoplastic cell.

[0992] In one aspect, the present disclosure provides a screening method for selecting a peptide or a peptidomimetic having the ability, after being associated or combined with an adhesion protein inhibitor as defined herein (thus forming a pharmaceutical association or combination as defined herein), to convert or recode a neoplastic cell into a non-neoplastic cell.

[0993] In one aspect, the present disclosure provides a screening method for selecting a peptide or peptidomimetic having the ability, after being associated or combined with an adhesion protein inhibitor as defined herein (thus forming a pharmaceutical association or combination as defined herein), to convert or recode a neoplastic cell into a non-neoplastic cell, the method comprising the steps of (a) providing a molecular model of the 3D structure coordinates of PEPREF as defined herein and (b) identifying a candidate analog having a RMSD value of 2.45 Å or less, in particular of 2 Å or less, and more particularly of 1.79 Å or less. In one particular example, step (b) is performed using the method of RMSD calculation as already defined herein.

[0994] In certain embodiments, the method can be performed using a computer (i.e., in silico). In some embodiments, the method can include providing the three-dimensional models of a plurality of peptides or peptidomimetics (i.e., a library or database of peptides or peptidomimetics) and screening each compound individually. Thus, in one aspect, the method of screening peptides or peptidomimetics generally includes computationally evaluating the potential of a selected peptide(s) or peptidomimetic(s) to structurally match with the computational model of the three-dimensional structure of PEPREF. For example, this method can include the steps of (a) employing a computational approach to perform a fitting operation between the selected peptide(s) or peptidomimetic(s) and the three-dimensional structure of PEPREF; and (b) analysing the results of the fitting operation to quantify the three-dimensional structural similarities between the peptide(s) or peptidomimetic(s) and PEPREF using the RMSD procedure as defined herein.

[0995] In one aspect, the present disclosure provides a method of producing a peptide or peptidomimetic having the ability, after being associated or combined with an adhesion protein inhibitor as defined herein (thus forming a pharmaceutical association or combination as defined herein), to convert or recode a neoplastic cell into a non-neoplastic cell, the method comprising the steps of (a) providing a molecular model of the following 3D structure coordinates of PEPREF; b) identifying a candidate analog having a RMSD as defined herein of 2.45 Å or less (in particular 2, more particularly 1.79); and (c) producing the candidate analog identified in step (b). In one particular example, said method further comprising the step of determining whether the compound produced in step (c) has a neoplastic cell recoding activity. In one particular example, steps (a) and (b) are performed by means of an electronic processor. In certain embodiments, step (a) comprises storing a representation of the atomic co-ordinates of PEPREF in a computer memory.

[0996] In one aspect, the present disclosure provides a method of producing a peptide or peptidomimetic having the ability, after being associated or combined with an adhesion protein inhibitor as defined herein (thus forming a pharmaceutical association or combination as defined herein), to convert or recode a neoplastic cell into a non-neoplastic cell, the method comprising the steps of: (a) providing in a computer memory atomic X-ray crystallographic co-ordinates of PEPREF; (b) generating with a processor a molecular model having a three-dimensional shape of PEPREF; (c) identifying a candidate analog having a RMSD of 2.45 Å or less (in particular 2, more particularly 1.79); (d) producing the candidate analog identified in step (c); and (e) determining whether the candidate analog produced in step (d), once associated or combined with an adhesion protein inhibitor as defined herein (thus forming a pharmaceutical association or combination as defined herein), has the ability to convert or recode a neoplastic cell into a non-neoplastic cell. In one particular example, said method comprises the additional step of producing the peptide or peptidomimetic in a commercially useful quantity.

[0997] In one aspect, the present disclosure provides a computer system comprising: (a) a memory comprising atomic X-ray crystallographic coordinates of PEPREF; and (b) a processor in electrical communication with the memory; wherein the processor generates a molecular model having a three dimensional shape representative of PEPREF. In one particular example, said coordinates are stored on a computer readable diskette.

[0998] XIV. Kits

[0999] The present disclosure provides a variety of kits for conveniently and/or effectively carrying out methods and uses of the present invention. Typically, kits will comprise sufficient amounts and/or numbers of components to allow a user to perform multiple treatments of a subject(s) and/or to perform multiple experiments.

[1000] In one aspect, the present disclosure provides kits for pharmaceutical association production, comprising at least one GFR-binding compound as defined herein, at least one adhesion protein inhibitor as defined herein, both provided in an amount effective to produce a pharmaceutical association to convert a neoplastic cell into a non-neoplastic cell and/or treat, prevent or diagnose a neoplastic disease when administered in-vitro, ex-vivo or in-vivo to a neoplastic cell or a subject carrying such a neoplastic cell, and packaging and instructions.

[1001] In one aspect, the present disclosure provides kits for pharmaceutical composition production, comprising a GFR-binding compound as defined herein, an adhesion protein inhibitor as defined herein, and a pharmaceutically acceptable excipient, carrier or vehicle, each of them provided in an amount effective to produce a pharmaceutical composition to convert a neoplastic cell into a non-neoplastic cell and/or treat or prevent a neoplastic disease when administered in-vitro, ex-vivo or in-vivo to a neoplastic cell or a subject carrying such a neoplastic cell, and packaging and instructions.

[1002] Suitable as solvents for use in kits of the invention include physiologically acceptable solvents, PBS, filtered and deionised water such as Milli-Q® water, alpha-MEM, DMEM and/or IMDM. All physiologically acceptable solvents suitable for implementing embodiments of the present invention are preferably deoxygenated before use.

[1003] In one example, said kit further comprises an administration device. In one example, said administration device is a dispensing device such as a syringe.

[1004] In one example, said kit comprises a first container containing a GFR-binding compound as defined herein and a second container containing an adhesion protein inhibitor.

[1005] In one particular example, said kits of the invention may suitably be provided in the form of a sterile packaging.

[1006] For example, in certain embodiments, said kits of the invention comprises more than 2, between 2 and 25, between 2 and 15, or between 2 and 10 of GFR-binding compound as defined herein, and more than 2, between 2 and 25, between 2 and 15, or between 2 and 10 GFR-binding compound as defined herein.

[1007] In one example, each GFR-binding compound and each adhesion protein inhibitor is conditioned in distinct and separated compartments, in lyophilised form, in solution or in suspension in a pharmaceutically dermatologically, prophylactically, diagnostically, imaging or cosmetically acceptable excipient, carrier or vehicle.

[1008] In one aspect, the invention discloses kit-of-parts comprising an adhesion protein inhibitor and a GFR-binding compound both as defined herein for uses and methods as defined herein.

[1009] XV. Sequence Listing

[1010] Examples of (modified) non-cyclic GFR-binding compounds as defined herein are listed in the appended sequence listing which forms an integral part of the present application.

[1011] Examples of (modified) cyclic GFR-binding compounds as defined herein are listed in the appended sequence listing which forms an integral part of the present application. (Modified) cyclic GFR-binding compounds of the present disclosure may be represented in non-cyclic, linear, form solely for the purpose of ease of representation but nevertheless remains cyclic compounds wherein the first and the last functional group (e.g. an amino acid) of the linearly represented compound are covalently connected to each other thereby forming a cyclic structure.

[1012] Pharmaceutical associations, combinations and compositions as defined in the present disclosure, has been found to lead to multiple and distinct advantages in terms of neoplastic diseases treatment.

[1013] As supported by the examples of the present application, pharmaceutical associations, combinations and compositions as defined in the present disclosure provide for a new area of treatment of neoplastic diseases by extracellularly converting or recoding neoplastic cells into functional and healthy cells. The therapy of the invention containing pharmaceutical associations, combinations or compositions as defined herein display advantages over therapies that do not contain it, such as any one of, and preferably a plurality of:
[1014] Enhanced and/or more practical and/or more efficient and/or more cost-effective and/or more adapted to the end-user needs;
[1015] Converting or recoding a neoplastic cell to induce and/or promote and/or improve self-healing and/or self-recovery thereof, particularly in a shorter period of time;
[1016] Converting a neoplastic cell into a non-neoplastic cell and/or protecting a subject from a neoplastic disease, disorder, condition, pathology, such as cancer, or symptoms thereof using non-mutagenic means;
[1017] Converting a neoplastic cell into a non-neoplastic cell and/or protecting a subject from a neoplastic disease, disorder, condition, pathology, such as cancer, or symptoms thereof using extracellular means;
[1018] Restoring a neoplastic cell ability to undergo differentiation, particularly in a shorter period of time;
[1019] Converting and/or recoding a circulating or non-circulating neoplastic cell such as a metastatic or non-metastatic cancer cell, into a non-neoplastic cell, particularly in a shorter period of time;
[1020] Protecting a subject from a neoplastic disease, disorder, condition or pathology such as cancer, and/or any symptoms thereof, particularly in a shorter period of time;
[1021] Providing and/or producing a physiologically functional and/or healthy osteoblast, osteocyte, chondroblast, chondrocyte, neuroblast, neurocyte, Sertoli cells, Leydig cell, Germ cell, Myoblast, Myocyte, keratinocyte, endothelial cells, angioblast, fibroblast, fibrocyte or podocyte from a neoplastic cell, particularly within a shorter period of time;
[1022] Re-establishing, reactivating or restoring the cell adhesion checkpoint of a neoplastic cell;
[1023] Treating a neoplastic cell without substantially inducing cell death;
[1024] Inducing quiescence of a neoplastic cell;
[1025] Dampening, reducing or suppressing cell division/proliferation of a neoplastic cell;
[1026] Activating and/or promoting and/or up-regulating anti-mitogen activity and/or tumor suppressor pathways and/or anti-oncogenic activity in a neoplastic cell;
[1027] Adapted to the treatment of any neoplastic cell;
[1028] Safer for the patient being treated as providing less or no harmful side-effects;
[1029] Offers the possibility for local treatments of neoplastic diseases;
[1030] Relies mainly or only on the activation of physiological cell mechanisms which increases the general safety of the herein defined therapy.

[1031] For example, in certain embodiments, pharmaceutical association or combinations, or compositions according to the present disclosure in which PEP1 is a peptide selected from the group consisting of SAIS, NAIS, SATS and SPIS, have been found to lead to unexpectedly fast conversion of a cancerous cell into a healthy and functional cell of the bone lineage.

[1032] For example, in certain embodiments, pharmaceutical association or combinations, or compositions according to the present disclosure in which PEP1 is a peptide selected from the group consisting of SAIS, NAIS, SPIS, EPLP, and EPLT, have been found to lead to unexpectedly fast conversion of a cancerous cell into a healthy and functional cell of the chondrocytic cell lineage.

[1033] For example, in certain embodiments, pharmaceutical association or combinations, or compositions according to the present disclosure in which PEP1 is a peptide selected from the group consisting of SNIT, RPVQ and RSVK, have been found to lead to unexpectedly fast conversion of a cancerous cell into a healthy and functional cell of the vascular lineage.

[1034] For example, in certain embodiments, pharmaceutical association or combinations, or compositions according to the present disclosure in which PEP1 is selected from the group consisting of NAIS, SPIS and EPIS, have been found to lead to unexpectedly fast conversion of a cancerous cell into a healthy and functional cell of the neuron lineage.

[1035] For example, in certain embodiments, pharmaceutical association or combinations, or compositions according to the present disclosure in which PEP1 is SPIN, have been found to lead to unexpectedly fast conversion of a cancerous cell into a healthy and functional cell of the eye-retina lineage.

[1036] For example, in certain embodiments, pharmaceutical association or combinations, or compositions according to the present disclosure in which PEP1 is SPIN, have been found to lead to unexpectedly fast conversion of a cancerous cell into a healthy and functional cell of the renal lineage.

[1037] For example, in certain embodiments, pharmaceutical association or combinations, or compositions according to the present disclosure in which PEP1 is a peptide selected from the group consisting of NAIS, SPIS, EPLP and EPLT, have been found to lead to unexpectedly fast conversion of a cancerous cell into a healthy and functional cell of the ligament and tendon lineage.

[1038] For example, in certain embodiments, pharmaceutical association or combinations, or compositions according to the present disclosure in which PEP1 is a peptide selected from the group consisting of EPLP, EPLT, RSVK and RPVQ, have been found to lead to unexpectedly fast conversion of a cancerous cell into a healthy and functional cell of the fibroblast lineage.

[1039] For example, in certain embodiments, pharmaceutical association or combinations, or compositions according to the present disclosure in which PEP1 is NAIS, in which PEP2 is LKKYR, have been found to lead to unexpectedly fast conversion of a cancerous cell into a healthy and functional cell of the reproduction system lineage.

[1040] For example, in certain embodiments, pharmaceutical association or combinations, or compositions according to the present disclosure in which PEP1 is selected from the group consisting of NAIS, SATS, SPIS, EPIS and SPIN, have been found to lead to unexpectedly fast conversion of a cancerous cell into a healthy and functional cell of the lung cell lineage.

[1041] For example, in certain embodiments, pharmaceutical association or combinations, or compositions according to the present disclosure in which PEP1 is selected from the group consisting of RSVK or RPVQ, have been found to lead to unexpectedly fast and qualitatively and quantitatively important muscle cells induction, producing highly functional differentiated cells.

[1042] For example, in certain embodiments, pharmaceutical association or combinations, or compositions according to the present disclosure in which PEP1 is SNIT, have been found to lead to unexpectedly fast conversion of a cancerous cell into a healthy and functional cell of the blood cell lineage.

[1043] For example, in certain embodiments, pharmaceutical association or combinations, or compositions according to the present disclosure in which PEP1 is SAIS or NAIS, have been found to lead to unexpectedly fast conversion of a cancerous cell into a healthy and functional cell of the adipocyte lineage.

[1044] Accordingly, it is possible to achieve the conversion of a neoplastic cell (e.g. a cancer cell) into a non-neoplastic cell (e.g. a functional and/or healthy cell of the bone, chondrocytic, muscle, vascular, neuronal, retinal, renal, ligament, tendon, fibroblast, blood, lung, adipocyte, reproduction system cell lineages) using extracellular, non-mutagenic active principles and is thus useful in the treatment of neoplastic diseases such as cancers.

[1045] The present invention provides a recoding therapy for the treatment of neoplastic diseases, conditions or disorders such as cancer and aims at providing a suitable micro-environment to the neoplastic cell containing suitable biological signals so that the neoplastic cell is able to undergo self-healing and become a functional, healthy, non-neoplastic cell.

[1046] In addition, it has been found that using the recoding therapy of the invention instead of conventional therapies allows for improved treatment selectivity in such a way that reduced or substantially no adverse side-effect is observed. Without wishing to be bound to any specific theory, this may be explained by considering that the present therapy relies on the activation of physiological cell mechanisms without imposing or forcing the treated cell to undergo e.g. apoptosis or cell cycle arrest (which would then most likely unselectively target any cells, healthy and neoplastic) but instead reestablishes the correct cellular microenvironment surrounding this neoplastic cell so that the cell is able to operate self-healing. As a result, a non-neoplastic cell i.e. a cell in which the cell cycle and/or cell adhesion checkpoint(s) need not be repaired, brought in contact with such a microenvironment would be less or not be substantially affected.

[1047] Remarkably, it has also been found that using the pharmaceutical associations or compositions as defined herein allows for the reduction (in most cases, important reduction) of the time of treatment of a neoplastic cell and by extension of a neoplastic disease in comparison with known technologies.

[1048] It is another aspect of the present invention to solve the technical problem of providing a therapy for treating neoplastic diseases being completely or at least partially devoid of one or more, preferably a plurality of the disadvantages of known treatments.

[1049] All combinations of any of the above-mentioned features described in all above part of the present description are specifically contemplated by the Applicant to be within the scope of the present invention unless contradictory in context. Examples of such combinations are detailed throughout the present description.

[1050] Further embodiments and advantages will become apparent to a skilled reader in light of the examples provided below.

### EXAMPLES

[1051] Disclosed and described, it is to be understood that this invention is not limited to the particular examples, process steps, and materials disclosed herein as such process steps and materials may vary somewhat. It is also to be understood that the terminology used herein is used for the purpose of describing particular embodiments only and not intended to be limiting since the scope of the present invention will be limited only by the appended claims and equivalents thereof.

[1052] The following Examples are representative of techniques employed by the inventor in carrying out aspects of the present invention. It should be appreciated that while these techniques are exemplary of preferred embodiments for the practice of the invention, those of skill in the art, in light of the present disclosure, will recognize that numerous modifications can be made without departing from the spirit and intended scope of the invention.

[1053] The Following Starting Materials and Reagents Were Used:
[1054] Type-I collagen sponge was obtained from Sigma®.
[1055] PBS 1X was obtained from Gibco®.
[1056] MilliQ water: is water characterised in terms of resistivity (typically 18.2 MΩ·cm at 25° C.).
[1057] Low glucose Dulbecco's Modified Eagle Medium (DMEM) was obtained from Invitrogen®
[1058] Minimum Essential Medium Eagle without ascorbic acid (αMEM) was obtained from Invitrogen®.
[1059] All of the cell culture experiments were carried out without any serum in the medium for the first 8 hours of culture.
[1060] Osteosarcoma cells: MG63 cells were obtained from ATCC®. These cells were cultured in DMEM (Eagle's Minimum Essential Medium) medium supplemented with 10% fetal calf serum (FCS) and 1% penicillin/streptomycin. All cells were used at a low passage number (passage 10), were subconfluently cultured and were seeded at 10⁴ cells/cm² for the purpose of the experiments.
[1061] Chondrosarcoma cells Hs819.T cells were obtained from ATCC®. These cells were cultured in DMEM (Eagle's Minimum Essential Medium) medium supplemented with 10% fetal calf serum (FCS) and 1% penicillin/streptomycin. All cells were used at a low passage number (passage 10), were subconfluently cultured and were seeded at 10⁴ cells/cm² for the purpose of the experiments.
[1062] Rhabdomyosarcoma cells: A-673 cells were obtained from ATCC®. These cells were cultured in DMEM (Eagle's Minimum Essential Medium) medium supplemented with 10% fetal calf serum (FCS) and 1% penicillin/streptomycin. All cells were used at a low passage number (passage 10), were subconfluently cultured and were seeded at 10⁴ cells/cm² for the purpose of the experiments.
[1063] Adenocarcinoma cells: HCC4006 cells were obtained from ATCC®. These cells were cultured in RPMI-1640 medium (obtained from ATCC®) supplemented with 10% fetal calf serum (FCS) and 1% penicillin/streptomycin. All cells were used at a low passage number (passage 10), were subconfluently cultured and were seeded at 10⁴cells/cm² for the purpose of the experiments.
[1064] CMFDA is a Cell Tracker Green obtained from Invitrogen®.
[1065] DAPI was obtained from Sigma®.
[1066] Fetal bovine serum (FBS) was obtained from Gibco®.
[1067] Penicillin/streptomycin was obtained from Invitrogen®.
[1068] The AlamarBlue® assay was obtained from Molecular Probes®.
[1069] Anti phospho-p53 antibody was obtained from Santa Cruz Biotechnology®,
[1070] Anti pRB antibody was obtained from Santa Cruz Biotechnology®,
[1071] Monoclonal anti-integrin (extracellular domain) αv, α5, α3, α4, β1, β3, β5 and β9 antibodies were obtained from Santa Cruz Biotechnology®,
[1072] Cell cytoskeletal filamentous actin (F-actin) was visualized by Alexa Fluor® 488 phalloidin Sigma® labeling.
[1073] Monoclonal anti-vinculin antibody (clone hVIN-1, produced in mouse) was obtained from Sigma®.

Primers for Cyclin D1:
5′-CCGTCCATGCGGAAGATC-3′ (Forward)
and
5′-GAAGACCTCCTCCTCGCACT-3′ (Reverse)
were obtained from Invitrogen®.
Primers for Cyclin D2:
5′-CATCCAACCGTACATGCGCAG-3′ (Forward)
and
5′-CATGGCCAGAGGAAAGACCTC-3′ (Reverse)
were obtained from Invitrogen®.
Primers for Cyclin D3:
5′-TGATTTCCTGGCCTTCATTC-3′ (Forward)
and
5′-CGGGTACATGGCAAAGGTAT-3′ (Reverse)
were obtained from Invitrogen®.
Primers for Paxillin:
5′-AATTCCAGTGCCTCCAACAC-3′ (Forward)
and
5′-GAGCTCATGACGGTAGGTGA-3′ (Reverse)
were obtained from Invitrogen®.
Primers for Vinculin:
5′-GCCAAGCAGTGCACAGATAA-3′ (Forward)
and
5′-TTCCTTTCTGGTGTGTGAAGC -3′ (Reverse)
were obtained from Invitrogen®.
Primers for DMP-1:
5′-AGCATCCTGCTCATGTTCCTTT-3′ (Forward)
and
5′-GAGCCAAATGACCCTTCCATT-3′ (Reverse)
were obtained from Invitrogen®.
Primers for Sclerostin:
5′-CTTAGTTTTCTCAGTCTGTGGTTGAAAT-3′ (Forward)
and
5′-AGAGTACCCCGAGCCTCC-3′ (Reverse)
were obtained from Invitrogen®.
Primers for RANK-L:
5′-CTCAGCCTTTTGCTCATCTCACT-3′ (Forward)
and
5′-CCAAGAGGACAGACTCACTTTATGG-3′ (Reverse)
were obtained from Invitrogen®.
Primers for MLC-1:
5′-AGAAGGGCTCCATGTCTGACA-3′ (Forward)
and
5′-AAGATTTCAGGACCCGAGCAG -3′ (Reverse)
were obtained from Invitrogen®.
Primers for GATA-4:
5′-AGGCCTCTTGCAATGCGGA-3′ (Forward)
and
5′-CTGGTGGTGGCGTTGCTGG -3′ (Reverse)
were obtained from Invitrogen®.
Primers for α-Sarcomeric actin:
5′-GACCACAGCTGAACGTGAGA-3′ (Forward)
and
5′-CATAGCACGATGGTCGATTG-3′ (Reverse)
were obtained from Invitrogen®.
Primers for Sox9:
5′-GACTTCCGCGACGTGGAC-3′ (Forward)
and
5′-GTTGGGCGGCAGGTACTG-3′ (Reverse)
were obtained from Invitrogen®.
Primers for IBSP:
5′-TGCCTTGAGCCTGCTTCC-3′ (Forward)
and
5′-GCAAAATTAAAGCAGTCTTCATTTTG-3′ (Reverse)
were obtained from Invitrogen®.
Primers for Collagen IV:
5′-CCTGGTCTTGAAAGGTGATAAG-3′ (Forward)
and
5′-CCCGCTATCCCTTGATCTC -3′ (Reverse)
were obtained from Invitrogen®.
Primers for Vimentin:
5′-TGTCCAAATCGATGTGGATGTTTC-3′ (Forward)
and
5′-TTGTACCATTCTTCTGCCTCCTG-3′ (Reverse)
were obtained from Invitrogen®.
Primers for MMP-9:
5′- AATCTCTTCTAGAGACTGGGAAGG AG-3′ (Forward)
and
5′-AGCTGATTGACTAAAGTAGCTGGA-3′ (Reverse)
were obtained from Invitrogen®.
Primers for α-SMA:
5′-CCGACCGAATGCAGAAGGA-3′ (Forward)
and
5′-ACAGAGTATTTGCGCTCCGAA -3′ (Reverse)
were obtained from Invitrogen®.
Primers for GAPDH:
5′-GCAGTACAGCCCCAAAATGG-3′ (Forward)
and
5′-ACAAAGTCCGGCCTGTATCCAA-3′ (Reverse)
were obtained from Invitrogen®.

[1074] All of the peptides were synthetized using conventional solution and/or solid phase peptide synthesis methods.
[1075] All of the experiments were performed with a concentration of 400 ng/mL of GFR-binding compound(s) as defined herein.
[1076] All cell culture experiments were performed with cultures on plastic coated with type-I collagen in order to mimic the physiological conditions of the human body.
[1077] The compositions of pharmaceutical compositions used in the examples below are summarized in the following table:

| | Pharmaceutical associations according to certain |
|---|---|
| Compositions | embodiments of the present disclosure |
| Composition A | SEQ ID NO: 10 + RGD (peptide) |
| Composition B | SEQ ID NO: 10 + SiRNA Integrin alpha 3 + SiRNA |
| | Integrin beta 1 |
| Composition C | SEQ ID NO: 9 + integrin alpha 3 Antibody + integrin |
| | beta 1 Antibody |
| Composition D | SEQ ID NO: 3 + SiRNA Integrin alpha 3 + RGDSPC |
| Composition E | SEQ ID NO: 11 + RGD (peptide) |
| Composition F | SEQ ID NO: 14 + SiRNA Syndecan 1 + SiRNA |
| | Syndecan 4 + integrin alpha 3 antibody |
| Composition I | SEQ ID NO: 16 + E-Selectin antibody + L-Selectin |
| | antibody |
| Composition J | SEQ ID NO: 22 + RGD (peptide) |
| Composition K | SEQ ID NO: 24 + SiRNA Integrin alpha v + SiRNA |
| | Integrin beta 3 + SiRNA Integrin alpha 5 |
| Composition L | SEQ ID NO: 36 + RGDC (peptide) |
| Composition M | SEQ ID NO: 37 + RGDC + REDV (peptides) |
| Composition N | SEQ ID NO: 35 + integrin alpha 2 Antibody + integrin |
| | beta 1 Antibody |

[1078] The two target sequences of human integrin α3 (Genbank accession number NM_002204) were designed to be unique relative to the sequences of other integrin members; catalogue number sc-35684 from Santa Cruz Biotechnology.
[1079] The two target sequences of human integrin B1 (Genbank accession number NM_002211) were designed to be unique relative to the sequences of other integrin members; catalogue number sc-44310 from Santa Cruz Biotechnology.
[1080] Integrin α3 Antibody is a goat polyclonal IgG, epitope mapping extracellular domain of Integrin α3 of human origin; catalogue number sc-28665 from Santa Cruz Biotechnology.
[1081] Integrin β1 Antibody is a goat polyclonal IgG, epitope mapping extracellular domain of Integrin β1 of human origin; catalogue number sc-9936 from Santa Cruz Biotechnology.
[1082] The two target sequences of human integrin α3 (Genbank accession number NM_002204) were designed to be unique relative to the sequences of other integrin members; catalogue number sc-35684 from Santa Cruz Biotechnology.
[1083] The two target sequences of human Syndecan 1 (Genbank accession number NM_002997) were designed to be unique relative to the sequences of other integrin members; catalogue number sc-36587 from Santa Cruz Biotechnology.
[1084] The two target sequences of human Syndecan 4 (Genbank accession number NM_002999) were designed to be unique relative to the sequences of other integrin members; catalogue number sc-36588 from Santa Cruz Biotechnology.
[1085] Integrin α3 Antibody is a goat polyclonal IgG, epitope mapping extracellular domain of Integrin α3 of human origin; catalogue number sc-28665 from Santa Cruz Biotechnology.
[1086] E-Selectin Antibody is a goat polyclonal IgG, epitope mapping extracellular domain of E-Selectin of human origin; catalogue number sc-6937 from Santa Cruz Biotechnology.
[1087] E-Selectin Antibody is a goat polyclonal IgG, epitope mapping extracellular domain of E-Selectin of human origin; catalogue number sc-6946 from Santa Cruz Biotechnology.
[1088] The two target sequences of human integrin av (Genbank accession number NM_002210) were designed to be unique relative to the sequences of other integrin members; catalogue number sc-29373 from Santa Cruz Biotechnology.
[1089] The two target sequences of human integrin β3 (Genbank accession number NM_000212) were designed to be unique relative to the sequences of other integrin members; catalogue number sc-29375 from Santa Cruz Biotechnology.
[1090] The two target sequences of human integrin α5 (Genbank accession number NM_002205) were designed to be unique relative to the sequences of other integrin members; catalogue number sc-29372 from Santa Cruz Biotechnology.
[1091] Integrin α2 Antibody is a goat polyclonal IgG, epitope mapping extracellular domain of Integrin α2 of human origin; catalogue number sc-6586 from Santa Cruz Biotechnology.
[1092] Integrin β3 Antibody is a goat polyclonal IgG, epitope mapping extracellular domain of Integrin β3 of human origin; catalogue number sc-9936 from Santa Cruz Biotechnology.

[1093] The Following General Methods Were Used:

[1094] Immunostaining:

[1095] The cells were first fixed for 20 min with 4% paraformaldehyde/PBS at 4° C. After fixation, the cells were permeabilized in PBS containing 1% Triton X-100 for 15 min. Protein immunofluorescent visualization was performed by first treating the cells with 1% (v/v) specific monoclonal antibodies for 1 hour at 37° C. Then the samples were incubated with Alexa fluor® 568 or 647 (F(ab′)2 fragment of IgG(H+L)) during 30 min at room temperature. The cell nuclei were counterstained in 20 ng/mL DAPI for 10 min at room temperature.

[1096] Quantification of Positive Contact Numbers and Areas:

[1097] For this type of quantification the freeware image analysis ImageJ® software was used. The raw image was first converted to an 8-bit file, and then the unsharp mask feature was used (settings 1:0.2) to remove the image background (rolling ball radius 10). After smoothing, the resulting image, which appears similar to the original photomicrograph but with minimal background, was then converted to a binary image by setting a threshold. Threshold values were determined empirically by selecting a setting, which gave the most accurate binary image for a subset of randomly selected photomicrographs. The cell area was determined by manual delineation on raw fluorescent images. Total contact area and mean contact area per cell were calculated by “analyse particules” in ImageJ®. A minimum of 50 cells per condition were analyzed.

[1098] Quantitative Real Time Polymerase Chain Reaction (RT-PCR):

[1099] After 24 hours of culture, total RNA was extracted by using the RNeasy total RNA kit (Qiagen®) according to the manufacturer's instructions. Purified total RNA was used as a template in order to make cDNA by a reverse transcription reaction (Gibco Brl®) with random primers (Invitrogen®). The cDNA was then used as a template for a real-time PCR amplification in the presence of SYBR green reagents (Bio-Rad®) by using a thermocycler (iCycler, Biorad®). Data were analyzed with the iCycler IQ™® software and compared by the ΔΔCt method. Briefly, the mean Ct value of the target gene was normalized to its averaged Ct values of the housekeeping gene (GAPDH) to give a ΔCt value, which was then normalized to a control sample to obtain a ΔΔCt value. The results were obtained from two series of experiments performed in triplicate.

[1100] Western Blot:

[1101] After 24 hours of culture, cells were permeabilized (10% SDS, 25 mM NaCl, 10 nM pepstatin and 10 nM leupeptin in distilled water and loading buffer), boiled for 10 minutes and resolved by reducing PAGE (Invitrogen). Proteins were transferred onto nitrocellulose, blocked, and labeled with HRP-conjugated antibodies (Invitrogen). Integrin αv, α5, α3, α4, β1, β3, β5, β9, phosphorylated ERK, phosphorylated Src Kinase, PDK1 and phosphorylated pRB and p53 were blotted by treating the nitrocellulose with monoclonal anti-integrin (extracellular domain) αv, α5, α3, α4, β1, β3, β5 and β6 antibodies (Santa Cruz Biotechnology). Phospho-Smad1/5/8 was blotted by treating the nitrocellulose with monoclonal anti-p-Smad1/5/8 (Santa Cruz Biotechnology). For all of the experiments the western blot was performed in triplicate, along with an additional blot for actin and coomassie blue staining to ensure constant protein load among samples. An integrins α3, αv, α5 shRNAs, integrins β1, β3 shRNAs, Syndecans 1, 4 were obtained from Santa Cruz Biotechnology.

[1102] Statistical Analysis:

[1103] In terms of real-time PCR assay, all of the data were expressed as mean±standard error, and analyzed statistically by the paired Student's t test method.

[1104] Covalent Association With Polymers (Such as PET or PEEK)

[1105] The polymer used in this study is poly(ethylene terephthalate) (PET). The polymers were first treated in order to create —COOH (carboxyl) functions on the PET surfaces from —OH (hydroxyl) functions. Next, the PET-COOH samples were immersed in a solution of dimethylaminopropyl-3-ethylcarbodiimide hydrochloride (EDC, 0.2 M)+N-hydroxysuccinimide (NHS, 0.1 M) in 2-(N-morpholino)-ethanesulfonic acid (MES) buffer (0.1 M in MilliQ water) and the samples were rinsed in MilliQ water (50 mL for 30 min). Finally, the covalent immobilization of the compounds (e.g. peptides) was achieved by using a solution of compound/1×PBS (C=10⁻³ M) incubated for 18 hours at room temperature. After grafting, the materials were rinsed in MilliQ water (100 ml) for 1 week.

### Example 1

### Osteosarcoma Recoding

[1106] Pharmaceutical associations of the invention were added to tumor cells, hereinafter osteosarcoma cells. Human osteosarcoma cells were obtained from ATCC®. Tumor cells were then cultured in Dulbecco's Modified Eagle Medium (DMEM, Invitrogen®) supplemented with 10% (v/v) fetal bovine serum (FBS), 1% penicillin/streptomycin and incubated in a humidified atmosphere containing 5% (v/v) CO₂ at 37° C. All of the cell culture experiments were performed without any serum in the medium for the first 8 hours of culture. All cells were used at a low passage number (≤passage 10), were subconfluently cultured and were seeded at 10 000 cells/cm² for the purpose of the experiments.

[1107] The cell phenotype was analyzed after 24 hours of cell culture. The human sarcoma cells adhere, spread, and differentiate into osteocyte cells as confirmed by analysis of DMP-1 (Dentin matrix acidic phosphoprotein 1), Sclerostin and RANK-L (receptor activator of nuclear factor kappa B ligand) expression (FIG. 1a). During cell recoding, osteosarcoma cells undergo important changes in their cell morphology such as cell shape modification, cell body size reduction and increase in cell processes in order to obtain the characteristic osteocyte morphology as shown in FIG. 1b wherein, after 18 and 24 h of cell culture, the cells were immunostained with labeled antibodies against actin in order to visualize and monitor the actin cytoskeleton, previously reported to play an important role in the establishment of the osteocyte morphology (FIG. 1b). The cells were also stained with antibodies against vinculin as a cytoplasmic focal cell adhesion marker in order to visualize in detail the cell morphology. The observed morphologies of the recoded cells were compared with the osteosarcoma cell morphology, immunostained using the same procedure. After 24 hours of cell culture the immunofluorescence labeling shows that the cell shape has already undergone some significant modifications and that the dendritic processes have already started (FIG. 1b). These cells presented a characteristic dendritic-like morphology, a total reduction in cell body volume of around 50% and expressed a set of known osteocytic markers. These results demonstrate that pharmaceutical associations of the invention induce the recoding of human osteosarcoma cells into osteocytes in a short period of time (24 hours).

### Example 2

### Rhabdomyosarcoma recoding

[1108] Pharmaceutical associations of the invention were added to tumor cells, hereinafter rhabdomyosarcoma cells. Human rhabdomyosarcoma cells were obtained from ATCC®. Tumor cells were then cultured in Dulbecco's Modified Eagle Medium (DMEM, Invitrogen®) supplemented with 10% (v/v) fetal bovine serum (FBS), 1% penicillin/streptomycin and incubated in a humidified atmosphere containing 5% (v/v) CO₂ at 37° C. All cell culture experiments were performed without any serum in the medium for the first 8 hours of culture. All cells were used at a low passage number (≤passage 10), were subconfluently cultured and were seeded at 10 000 cells/cm² for the purpose of the experiments.

[1109] It was observed that these tumor cells cultured in the presence of pharmaceutical associations of the invention were converted into muscle cells (myocyte like-cells) by analyzing the expression of the myogenic biomarkers MLC-1 (myocyte light chain 1), GATA-4 and a-Sarcomeric actin. An increased expression of these genes was observed after 24 hours of culture (FIG. 2) as characterized using Quantitative Real Time PCR as described in the Methods section.

### Example 3

### Mesenchymal Chondrosarcoma Recoding

[1110] Pharmaceutical associations of the invention were added to tumor cells, hereinafter chondrosarsoma cells. Human chondrosarcoma cells were obtained from ATCC®. Tumor cells were then cultured in Dulbecco's Modified Eagle Medium (DMEM, Invitrogen®) supplemented with 10% (v/v) fetal bovine serum (FBS), 1% penicillin/streptomycin and incubated in a humidified atmosphere containing 5% (v/v) CO₂ at 37° C. All cell culture experiments were performed without any serum in the medium for the first 8 hours of culture. All cells were used at a low passage number (≤passage 10), were subconfluently cultured and were seeded at 10 000 cells/cm² for the purpose of the experiments.

[1111] It was observed that these tumor cells cultured in the presence of pharmaceutical associations of the invention were converted into cartilage cells (chondrocyte like-cells) by analyzing the expression of the chondrocytic biomarkers Sox9, IBSP (Sialoprotein II) and collagen IV. An increased expression of these genes was observed after 24 hours of culture (FIG. 3) as characterized using Quantitative Real Time PCR as described in the Methods section.

### Example 4

### Adenocarcinoma Recoding

[1112] Pharmaceutical associations of the invention were added to tumor cells, hereinafter adenocarcinoma cells. Human adenocarcinoma cells were obtained from ATCC®. Tumor cells were then cultured in RPMI-1640 medium supplemented with 10% (v/v) fetal bovine serum (FBS), 1% penicillin/streptomycin and incubated in a humidified atmosphere containing 5% (v/v) CO₂ at 37° C. All cell culture experiments were carried out without any serum in the medium for the first 8 hours of culture. All cells were used at a low passage number (≤passage 10), were subconfluently cultured and were seeded at 10 000 cells/cm² for the purpose of the experiments.

[1113] It was observed that these tumor cells cultured in the presence of pharmaceutical associations of the invention were converted into epithelial cells (fibrocyte like-cells) by analyzing the expression of the fibrocytic biomarkers MMP-9, Vimentin and α-SMA. An increased expression of these genes was observed after 24 hours of culture (FIG. 4) as characterized using Quantitative Real Time PCR as described in the Methods section.

### Example 5

### Recoding of Neoplastic Cells Indicated by Significantly Reduced Proliferation Markers

[1114] Neoplastic cells (in this example osteosarcoma cells) were cultured in the presence of pharmaceutical associations of the invention. A rapid (24 hours) decrease of the tumor markers was observed (FIG. 5). The adhesion checkpoint then activates the tumor suppressor proteins p53 and pRB. It was observed that, in tumor cells cultured in the presence of pharmaceutical associations of the invention, the expression of p53 decreases as demonstrated by quantification of protein expression level (immunofluorescence staining and quantification using ImageJ as described in the general methods section) (FIG. 5A) and the pRB is dephosphorylated as demonstrated by a quantification of protein phosphorylation level (immunofluorescence staining and subsequent quantification by using the ImageJ software as described in the general methods section) (FIG. 5B).

[1115] Alginate matrices comprising various cyclic GFR-binding peptides in association with SiRNA Integrin alpha 3 and SiRNA Integrin beta 1, were also tested against MG63 cells using the same procedure and displayed significant recoding activity as shown in Table 4 below.

[1116] The alginate used in these experiments was the Ultra Pure Sodium alginate powder PRONOVA UP MVG from Novamatrix (FMC Biopolymers, cat. no. 4200106). To a 1% MillQ water (1 g per 100 mL) alginate solution were added the cyclic GFR-binding peptide and the SiRNA molecules. The resulting mixture was then added to the cell cultures for 48 h.

TABLE 4

| | | | pRB |
|---|---|---|---|
| SEQ ID No | Sequences | P53 (%) | (%) |
| SEQ ID NO: 4717 | GGGGGGGGGDENEKVVNDEGLESVPEDLSSLSVLFFDENEKVV | 42 | 12 |
| SEQ ID NO: 4718 | GGGGGGGGGDDSSNVIRVPSTSSVPTGQSAISTLYLDDSSNVI | 40 | 10 |
| SEQ ID NO: 4719 | GGGGGGGGGDDSSNVIRVPSTSSAPTKMNAISMLYFDENEKVV | 44 | 15 |
| SEQ ID NO: 4720 | GGGGGGGGGDENEKVVGIPEPSSAPVDLKPLSTLYVDENEKVV | 38 | 9 |
| SEQ ID NO: 4721 | AAAAAAAAADENEKVVAASKASSVPQEEEPLPMVYYDAANNVV | 39 | 12 |
| SEQ ID NO: 4722 | GGGGGGGGGDDSSNVIKIPKASSVPTGGSNITVQIMDDSSNVI | 51 | 17 |
| SEQ ID NO: 4723 | AAAAAAAAADENEKVVAASKASSSRVELRSVKIAKVDDSSNVI | 50 | 8 |
| SEQ ID NO: 4724 | GGGGGGGGGDENEKVVKIPKASSTQVRLRPVQIRKIDAANNVV | 47 | 7 |
| SEQ ID NO: 4725 | GGGGGGGGGDDSSNVISTPPTSSSRVQLSAISMLYLDDSSNVI | 29 | 6 |
| SEQ ID NO: 4726 | GGGGGGGGGDENEKVVRVPSTSSTQVKMSAISMLYLDENEKVV | 32 | 10 |
| SEQ ID NO: 4727 | AAAAAAAAADAANNVVKIPKASSSRVRLSSLSTLFFDAANNVV | 32 | 11 |
| SEQ ID NO: 4728 | GGGGGGGGGDDSSNVIAASKASSTPTDLNAISTLYFDDSSNVI | 33 | 15 |
| SEQ ID NO: 4729 | GGGGGGGGGDENEKVVRVPSTSSTQVDLNAISVLYFDENEKVV | 38 | 13 |
| SEQ ID NO: 4730 | AAAAAAAAADAANNVVGIPEPSSVSQELSATSMLYYDAANNVV | 37 | 10 |
| SEQ ID NO: 4731 | GGGGGGGGGDDSSNVIGIPEPSSAPTRLEPISMLYLDENEKVV | 40 | 8 |
| SEQ ID NO: 4732 | GGGGGGGGGDENEKVVKIPKASSVSQQLEPISTLYLDENEKVV | 42 | 9 |
| SEQ ID NO: 4733 | GGGGGGGGGDENEKVVSTPPTSSVPTEVSPINTLYFDENEKVV | 38 | 17 |
| SEQ ID NO: 4734 | AAAAAAAAADENEKVVKIPKASSVPTKMKPLSVLYVDDSSNVI | 50 | 12 |
| SEQ ID NO: 4735 | GGGGGGGGGDDSSNVISTPPTSSVSQKMKPLSILYVDDSSNVI | 51 | 8 |
| SEQ ID NO: 4736 | GGGGGGGGGFDNDENVVRVPSTSSVPEKMEPLTMLYYFDNDENVV | 47 | 9 |
| SEQ ID NO: 4737 | GGGGGGGGGFDNDENVVSTPPTSSTPTKMSNITTQIMFDNDENVV | 53 | 18 |
| SEQ ID NO: 4738 | AAAAAAAAADENEKVVRVPSTSSVPAEESNITVQIMDDSSNVI | 55 | 16 |
| SEQ ID NO: 4739 | GGGGGGGGGFDNDENVVAASKASSVPQRLRSVKVAKVFDNDENVV | 51 | 14 |
| SEQ ID NO: 4740 | AAAAAAAAADAANNVVKIPKASSTQVRLRSVKTAKVDAANNVV | 52 | 15 |
| SEQ ID NO: 4741 | AAAAAAAAADENEKVVAASKASSVPEKMRPVQTRKIDDSSNVI | 49 | 15 |
| SEQ ID NO: 4742 | GGGGGGGGGFDNDENVVGIPEPSSAPVDMRPVQIRKIFDNDENVV | 46 | 14 |

### Example 6

### Adhesion Checkpoint Activation

[1117] Neoplastic cells (in this example osteosarcoma cells) were cultured in the presence of pharmaceutical associations of the invention. The main signaling pathways include: Ras/MAP kinase, FAK/Src kinase and PIP2 which are decreased after 24 hours as shown by western blot quantifications (FIG. 6). This demonstrated by the absence of phosphorylation at Thr202 and Tyr204 on ERK (FIG. 6A). Moreover, no phosphorylation at Thr416 but phosphorylation of Tyr527 was observed on Src kinase (FIG. 6B). Finally, a decrease of 3-phosphoinositide-dependent protein kinase 1 (PDK1) protein expression was also was observed (FIG. 6C).

### Example 7

### Decrease of Paxillin and Vinculin Gene Expression

[1118] Neoplastic cells (in this example osteosarcoma cells) were cultured in the presence of pharmaceutical associations of the invention. After 24 hours, the Paxillin and Vinculin gene expression decreased as shown by RT-PCR (FIG. 7).

### Example 8

### Cyclin D Profile

[1119] Neoplastic cells (in this example osteosarcoma cells) were cultured in the presence of pharmaceutical associations of the invention. The Cyclin D (the arithmetic mean of Cyclin D1, Cyclin D2 and Cyclin D3) gene expression decreased after the first 30 min of cell culture as shown by RT-PCR (FIG. 8). These data indicate the entry of the cells into G0 quiescence phase.

### Example 9

### Growth Factor Receptor Activation

[1120] The data summarized in Table 5 below demonstrate that the tumor cell recoding action ((in this example: human osteosarcoma cells, MG63, via quantification of pRB) of pharmaceutical associations according to certain embodiments of the present disclosure involves the activation of growth factor receptors as demonstrated by the activation of the Smad1/5/8 signaling pathway (via quantification of western blots of phospho-smad1/5/8):

TABLE 5

| | Pharmaceutical association according | p-Smad1/5/8 | pRB |
|---|---|---|---|
| Compositions | to the present disclosure | (%) | (%) |
| Composition R | SEQ ID NO 54 + SiRNA Integrin alpha 3, v, + SiRNA | 32 | 23 |
| | Integrin beta 1 | | |
| Composition V | SEQ ID NO 56 + SiRNA Integrin alpha 3 + SiRNA Integrin | 28 | 18 |
| | beta 1 | | |
| Composition W | SEQ ID NO 57 + integrin alpha 3 Antibody + integrin beta 1 | 41 | 17 |
| | Antibody + RGDSPC | | |
| Composition S | SEQ ID NO 58 + SiRNA Integrin alpha 3 + RGDSPC + | 37 | 15 |
| | SiRNA Syndecan 1 | | |
| Composition Z | SEQ ID NO 59 + E-Selectin antibody + L-Selectin antibody | 29 | 21 |
| Composition X | SEQ ID NO 62 + SiRNA Syndecan 1 + SiRNA Syndecan 4 + | 31 | 18 |
| | integrin alpha 3 antibody | | |
| Composition Y | SEQ ID NO 63 + RGD + SiRNA Integrin alpha 3, v, 4 + SiRNA | 34 | 22 |
| | Integrin beta 1 | | |

### Example 10

### RMSD Measurement and Recoding Activity

[1121] The data summarized in Table 6 below demonstrate that pharmaceutical associations according to certain embodiments of the present disclosure containing GFR-binding compounds as disclosed herein having a RMSD value of 2.45 Å or less, induce the particularly efficient recoding (as shown via quantification of pRB) of neoplastic cells (in this example: human osteosarcoma cells, MG63) into healthy cells:

TABLE 6

| | | RMSD | pRB |
|---|---|---|---|
| SEQ ID | AA sequences | (Å) | (%) |
| SEQ ID NO: 54 | SIPKASSTPTELSPINMLYF | 0.73 | 23 |
| SEQ ID NO: 56 | NDEGLESVPTEESAISMLYL | 0.96 | 18 |
| SEQ ID NO: 57 | SSVKSQPSRVHHSPISILFI | 0.79 | 17 |
| SEQ ID NO: 58 | ASASPSSVSQDLSSLSILFF | 0.79 | 15 |
| SEQ ID NO: 59 | VVPKPSSAPTQLEPISILYL | 0.72 | 21 |
| SEQ ID NO: 62 | SSVKSQPSRVHHKPLSMLYV | 0.71 | 18 |
| SEQ ID NO: 63 | NDEGLESVPTEERSVKVAKV | 1.45 | 22 |

### Example 11

### The presence of Adhesion Components in the Extracellular Microenvironment Inhibits Cell Conversion

[1122] In order to demonstrate the importance of adhesion proteins inhibition in the recoding process of a neoplastic cell, a PET substrate was covalently functionalized with RGD peptides (the primary integrin recognition site present in many ECM proteins (e.g., fibronectin)) and an exemplary GFR-binding compound according to the present disclosure using methods already described herein.

[1123] This modified substrate was then cultured with human osteosarcoma cells from ATCC® in Dulbecco's Modified Eagle Medium (DMEM, Invitrogen®) supplemented with 10% (v/v) fetal bovine serum (FBS), 1% penicillin/streptomycin and incubated in a humidified atmosphere containing 5% (v/v) CO₂ at 37° C. All cell culture experiments were performed without any serum in the medium for the first 8 hours of culture. All cells were used at a low passage number (≤passage 10), were subconfluently cultured and were seeded at 10 000 cells/cm² for the purpose of the experiments. As shown in FIGS. 9A and 9B, the presence of covalently immobilized components favorising the adhesion inhibited the process of recoding of the osteosarcoma cells into osteocytes as characterized by RT-PCR and cell morphology observation.

[1124] It was also confirmed that the presence of RGD peptides did not modify the density of covently grafted GFR-binding compounds. Indeed, it was observed that the GFR-binding compound density was stable (around 1.3 pmol/mm²) with or without RGD peptides (FIG. 9C).

[1125] It was also shown that the RGD peptides interacted specifically with integrin α3β1. Indeed, inhibition of α3β1, α5β3 and αvβ3 integrins (i.e., the three predominant receptor dimers involved in binding ECM molecules containing RGD motifs for the osteosarcoma cells) by specific antibodies, indicated that cells predominantly engaged α3β1 integrins to interact with the RGD-modified substrate on the basis of the observed decrease of osteosarcoma cells adhesion in response to anti-α3β1 treatment (FIG. 9D). This was not observed when αvβ3 and α5β3 were blocked (FIG. 9E). For these antibody inhibition studies, cells were preincubated with 5 g/mL anti-α3β1 (clone JBSS), anti-αvβ1 (clone LM609) and anti-α5β3.

### Example 12

### Integrin Engagement Inhibits Cell Conversion

[1126] Using the same setup as used in Example 9 (tumor cell and PET functionalized with RGD peptides and an exemplary GFR-binding compound), silencing of integrin α3 and integrin β1 expression using shRNA was shown to reduce integrin α3 and integrin β1 mRNA levels by 60-70% and 50-60% respectively and integrin α3 and integrin β1 proteins levels by 60-70% after 24 h. It was then shown that both integrins α3 and β1 shRNAs modulated osteosarcoma adhesion and spreading on RGD-modified substrates (FIGS. 10 A, B).

[1127] Without being bound to any specific theory, integrin α3β1 thus appears to be an important factor in the conservation of osteosarcomas tumourous profile and appears to play an important role in the recoding of osteosarcomas into osteocytes. Herein, α3β1 integrin engagement appears to be involved in the inhibition of osteocytic recoding but not in osteosarcoma induction. Indeed, it was observed, within the framework of this experiment, that spheroid-like structures of osteosarcomas became progressively predominant (FIG. 10C). These results seems to demonstrate that integrin engagement has the ability to influence the behavior of human osteosarcoma towards spheroid-like structures or towards osteocytes.

1. A pharmaceutical association comprising at least one growth factor receptor-binding compound, which activates at least one growth factor receptor of a neoplastic cell, and at least one adhesion protein inhibitor which inhibits at least one transmembrane cell adhesion protein of said neoplastic cell, wherein said growth factor receptor-binding compound is a peptide or a peptidomimetic.

2-4. (canceled)

5. The pharmaceutical association according to claim 1, wherein said growth factor receptor-binding compound comprises a peptide with four amino acids PEP 1; and wherein PEP 1 is selected from the group consisting of SAIS, SSLS, NAIS, SATS, SPIS, EPIS, SPIN, KPLS, EPLP, EPLT, SNIT, RSVK and RPVQ.

6. The pharmaceutical association according to claim 1, wherein said growth factor receptor is selected from group consisting of epidermal growth factor receptors, fibroblast growth factor receptors, vascular endothelial growth factor receptors, nerve growth factor receptors, insulin receptor family, Trk receptor family, Eph receptor family, AXL receptor family, LTK receptor family, TIE receptor family, ROR receptor family, DDR receptor family, RET receptor family, KLG receptor family, RYK receptor family, MuSK receptor family, hepatocyte growth factor receptors, somatomedin or insulin-like growth factor receptors, platelet-derived growth factor receptors, and transforming growth factor beta superfamily proteins.

7. The pharmaceutical association according to claim 1, wherein said adhesion inhibitor is selected from the group consisting of an integrin inhibitor which inhibits at least one integrin, a syndecan inhibitor which inhibits at least one syndecan, a selectin inhibitor which inhibits at least one selectin, a dystroglycan inhibitor which inhibits at least one dystroglycan, and any combinations thereof.

8-19. (canceled)

20. The pharmaceutical association according to claim 1, wherein said growth factor receptor-binding compound comprises a peptide with eight amino acids PEP12; wherein PEP12 is a peptide of general formula PEP1-AA¹⁷-PEP11; wherein AA¹⁷ is selected from the group consisting of G, A, V, L, I, P, F, M, W, T and S; wherein PEP11 is a peptide with 3 amino acids of general formula AA¹⁸-AA¹⁹-AA²⁰; wherein AA¹⁸ is selected from the group consisting of L, V, Q, A and R; wherein AA¹⁹ is selected from the group consisting of F, W, H, Y, I and K; wherein AA²⁰ is selected from the group consisting of L, F, Y, K, I, V and M.

21. The pharmaceutical association according to claim 20, wherein PEP11 is selected from the group consisting of LYL, LFF, LYF, LYY, LYK, LYI, LFI, LYV, VYY, QIM, AKV and RKI.

22-125. (canceled)

126. The pharmaceutical association according to claim 1, wherein said growth factor receptor-binding compound is a non-cyclic growth factor receptor-binding compound having a growth factor receptor binding capability and has a molecular weight of less than 4,000 Daltons, or a cyclic growth factor receptor-binding compound having a growth factor receptor binding capability and has a molecular weight of less than 7,000 Daltons.

127. The pharmaceutical association according to claim 1, wherein said growth factor receptor-binding compound is a non-cyclic peptide with between 8 and 30 amino acids having growth factor receptor-binding capability, or is a non-cyclic peptidomimetic having growth factor receptor-binding capability, wherein said peptidomimetic has a molecular weight comprised between 600 and 4,000 Daltons.

128. The pharmaceutical association according to claim 127, wherein said peptidomimetic comprises between 8 and 30 amino acids.

129. The pharmaceutical association according to claim 1, wherein the RMSD value of the structure coordinates of said peptide or peptidomimetic with respect to PEPREF is 2.45 Å (Angstroms) or less, and wherein PEPREF is

| | | | | | | | | |
|---|---|---|---|---|---|---|---|---|
| ATOM | 511 | N | LYS | A | 1 | −14.570 | 46.437 | 27.424 |
| ATOM | 512 | CA | LYS | A | 1 | −13.512 | 45.748 | 28.151 |
| ATOM | 513 | C | LYS | A | 1 | −13.655 | 44.259 | 27.884 |
| ATOM | 514 | O | LYS | A | 1 | −12.769 | 43.463 | 28.197 |
| ATOM | 515 | CB | LYS | A | 1 | −13.605 | 46.029 | 29.652 |
| ATOM | 516 | CG | LYS | A | 1 | −13.640 | 47.509 | 29.991 |
| ATOM | 517 | CD | LYS | A | 1 | −12.615 | 48.297 | 29.183 |
| ATOM | 518 | CE | LYS | A | 1 | −12.625 | 49.768 | 29.575 |
| ATOM | 519 | NZ | LYS | A | 1 | −13.994 | 50.369 | 29.497 |
| ATOM | 520 | N | ILE | A | 2 | −14.792 | 43.890 | 27.309 |
| ATOM | 521 | CA | ILE | A | 2 | −15.051 | 42.499 | 26.967 |
| ATOM | 522 | C | ILE | A | 2 | −14.911 | 42.370 | 25.444 |
| ATOM | 523 | O | ILE | A | 2 | −15.531 | 43.125 | 24.683 |
| ATOM | 524 | CB | ILE | A | 2 | −16.466 | 42.065 | 27.401 |
| ATOM | 525 | CG1 | ILE | A | 2 | −16.630 | 42.238 | 28.915 |
| ATOM | 526 | CG2 | ILE | A | 2 | −16.710 | 40.629 | 26.985 |
| ATOM | 527 | CD1 | ILE | A | 2 | −15.631 | 41.478 | 29.30 |
| ATOM | 528 | N | PRO | A | 3 | −14.085 | 41.411 | 24.989 |
| ATOM | 529 | CA | PRO | A | 3 | −13.789 | 41.109 | 23.588 |
| ATOM | 530 | C | PRO | A | 3 | −14.998 | 40.695 | 22.768 |
| ATOM | 531 | O | PRO | A | 3 | −15.969 | 40.164 | 23.305 |
| ATOM | 532 | CB | PRO | A | 3 | −12.785 | 39.968 | 23.688 |
| ATOM | 533 | CG | PRO | A | 3 | −12.156 | 40.166 | 25.007 |
| ATOM | 534 | CD | PRO | A | 3 | −13.330 | 40.506 | 25.867 |
| ATOM | 535 | N | LYS | A | 4 | −14.937 | 40.937 | 21.463 |
| ATOM | 536 | CA | LYS | A | 4 | −16.023 | 40.529 | 20.590 |
| ATOM | 537 | C | LYS | A | 4 | −15.886 | 39.015 | 20.391 |
| ATOM | 538 | O | LYS | A | 4 | −14.903 | 38.415 | 20.831 |
| ATOM | 539 | CB | LYS | A | 4 | −15.926 | 41.244 | 19.245 |
| ATOM | 540 | CG | LYS | A | 4 | −15.802 | 42.751 | 19.355 |
| ATOM | 541 | CD | LYS | A | 4 | −16.292 | 43.433 | 18.083 |
| ATOM | 542 | CE | LYS | A | 4 | −16.162 | 44.943 | 18.177 |
| ATOM | 543 | NZ | LYS | A | 4 | −16.825 | 45.628 | 17.019 |
| ATOM | 544 | N | ALA | A | 5 | −16.85 | 38.393 | 19.759 |
| ATOM | 545 | CA | ALA | A | 5 | −16.811 | 36.955 | 19.507 |
| ATOM | 546 | C | ALA | A | 5 | −15.772 | 36.771 | 18.416 |
| ATOM | 547 | O | ALA | A | 5 | −15.727 | 37.534 | 17.455 |
| ATOM | 548 | CB | ALA | A | 5 | −18.168 | 36.419 | 19.043 |
| ATOM | 549 | N | CYS | A | 6 | −14.935 | 35.756 | 18.562 |
| ATOM | 550 | CA | CYS | A | 6 | −13.887 | 35.518 | 17.584 |
| ATOM | 551 | C | CYS | A | 6 | −14.347 | 34.765 | 16.338 |
| ATOM | 552 | O | CYS | A | 6 | −15.327 | 34.018 | 16.368 |
| ATOM | 553 | CB | CYS | A | 6 | −12.743 | 34.768 | 18.241 |
| ATOM | 554 | SG | CYS | A | 6 | −11.198 | 34.959 | 17.353 |
| ATOM | 555 | N | CYS | A | 7 | −13.623 | 34.973 | 15.243 |
| ATOM | 556 | CA | CYS | A | 7 | −13.931 | 34.328 | 13.969 |
| ATOM | 557 | C | CYS | A | 7 | −13.091 | 33.071 | 13.798 |
| ATOM | 558 | O | CYS | A | 7 | −11.961 | 33.123 | 13.302 |
| ATOM | 559 | CB | CYS | A | 7 | −13.653 | 35.290 | 12.824 |
| ATOM | 560 | SG | CYS | A | 7 | −13.930 | 34.633 | 11.154 |
| ATOM | 561 | N | VAL | A | 8 | −13.654 | 31.941 | 14.209 |
| ATOM | 562 | CA | VAL | A | 8 | −12.949 | 30.684 | 14.110 |
| ATOM | 563 | C | VAL | A | 8 | −13.653 | 29.733 | 13.157 |
| ATOM | 564 | O | VAL | A | 8 | −14.759 | 30.016 | 12.687 |
| ATOM | 565 | CB | VAL | A | 8 | −12.814 | 30.038 | 15.492 |
| ATOM | 566 | CG1 | VAL | A | 8 | −11.807 | 30.825 | 16.337 |
| ATOM | 567 | CG2 | VAL | A | 8 | −14.161 | 30.006 | 16.170 |
| ATOM | 568 | N | PRO | A | 9 | −13.003 | 28.601 | 12.828 |
| ATOM | 569 | CA | PRO | A | 9 | −13.593 | 27.615 | 11.918 |
| ATOM | 570 | C | PRO | A | 9 | −14.726 | 26.886 | 12.631 |
| ATOM | 571 | O | PRO | A | 9 | −14.581 | 26.476 | 13.780 |
| ATOM | 572 | CB | PRO | A | 9 | −12.423 | 26.676 | 11.601 |
| ATOM | 573 | CG | PRO | A | 9 | −11.204 | 27.487 | 11.925 |
| ATOM | 574 | CD | PRO | A | 9 | −11.620 | 28.226 | 13.163 |
| ATOM | 575 | N | THR | A | 10 | −15.847 | 26.721 | 11.942 |
| ATOM | 576 | CA | THR | A | 10 | −16.999 | 26.060 | 12.527 |
| ATOM | 577 | C | THR | A | 10 | −17.334 | 24.767 | 11.804 |
| ATOM | 578 | O | THR | A | 10 | −18.097 | 23.943 | 12.303 |
| ATOM | 579 | CB | THR | A | 10 | −18.211 | 27.010 | 12.523 |
| ATOM | 580 | OG1 | THR | A | 10 | −18.491 | 27.445 | 11.185 |
| ATOM | 581 | CG2 | THR | A | 10 | −17.902 | 28.230 | 13.375 |
| ATOM | 582 | N | GLU | A | 11 | −16.750 | 24.586 | 10.627 |
| ATOM | 583 | CA | GLU | A | 11 | −16.980 | 23.377 | 9.848 |
| ATOM | 584 | C | GLU | A | 11 | −15.643 | 22.935 | 9.246 |
| ATOM | 585 | O | GLU | A | 11 | −15.029 | 23.666 | 8.464 |
| ATOM | 586 | CB | GLU | A | 11 | −17.981 | 23.624 | 8.715 |
| ATOM | 587 | CG | GLU | A | 11 | −19.421 | 23.807 | 9.163 |
| ATOM | 588 | CD | GLU | A | 11 | −19.686 | 25.166 | 9.770 |
| ATOM | 589 | OE1 | GLU | A | 11 | −19.478 | 26.175 | 9.073 |
| ATOM | 590 | OE2 | GLU | A | 11 | −20.111 | 25.227 | 10.939 |
| ATOM | 591 | N | LEU | A | 12 | −15.183 | 21.749 | 9.622 |
| ATOM | 592 | CA | LEU | A | 12 | −13.923 | 21.254 | 9.104 |
| ATOM | 593 | C | LEU | A | 12 | −14.062 | 19.912 | 8.386 |
| ATOM | 594 | O | LEU | A | 12 | −15.136 | 19.299 | 8.359 |
| ATOM | 595 | CB | LEU | A | 12 | −12.893 | 21.144 | 10.230 |
| ATOM | 596 | CG | LEU | A | 12 | −12.660 | 22.422 | 11.054 |
| ATOM | 597 | CD1 | LEU | A | 12 | −13.475 | 22.350 | 12.337 |
| ATOM | 598 | CD2 | LEU | A | 12 | −11.181 | 22.586 | 11.399 |
| ATOM | 599 | N | SER | A | 13 | −12.971 | 19.476 | 7.771 |
| ATOM | 600 | CA | SER | A | 13 | −12.964 | 18.218 | 7.046 |
| ATOM | 601 | C | SER | A | 13 | −11.568 | 17.628 | 7.164 |
| ATOM | 602 | O | SER | A | 13 | −10.613 | 18.320 | 7.550 |
| ATOM | 603 | CB | SER | A | 13 | −13.346 | 18.435 | 5.578 |
| ATOM | 604 | OG | SER | A | 13 | −12.404 | 19.261 | 4.923 |
| ATOM | 605 | N | ALA | A | 13 | −11.449 | 16.352 | 6.818 |
| ATOM | 606 | CA | ALA | A | 13 | −10.179 | 15.665 | 6.949 |
| ATOM | 607 | C | ALA | A | 13 | −9.421 | 15.471 | 5.652 |
| ATOM | 608 | O | ALA | A | 13 | −9.941 | 15.720 | 4.563 |
| ATOM | 609 | CB | ALA | A | 13 | −10.413 | 14.306 | 7.626 |
| ATOM | 610 | N | ILE | A | 14 | −8.171 | 15.046 | 5.783 |
| ATOM | 611 | CA | ILE | A | 14 | −7.343 | 14.746 | 4.623 |
| ATOM | 612 | C | ILE | A | 14 | −6.475 | 13.559 | 5.004 |
| ATOM | 613 | O | ILE | A | 14 | −6.212 | 13.316 | 6.183 |
| ATOM | 614 | CB | ILE | A | 14 | −6.401 | 15.916 | 4.183 |
| ATOM | 615 | CG1 | ILE | A | 14 | −5.284 | 16.106 | 5.200 |
| ATOM | 616 | CG2 | ILE | A | 14 | −7.188 | 17.211 | 3.982 |
| ATOM | 617 | CD1 | ILE | A | 14 | −4.173 | 16.973 | 4.696 |
| ATOM | 618 | N | SER | A | 15 | −6.045 | 12.806 | 3.999 |
| ATOM | 619 | CA | SER | A | 15 | −5.187 | 11.662 | 4.242 |
| ATOM | 620 | C | SER | A | 15 | −3.740 | 12.089 | 4.217 |
| ATOM | 621 | O | SER | A | 15 | −3.360 | 13.020 | 3.508 |
| ATOM | 622 | CB | SER | A | 15 | −5.416 | 10.584 | 3.185 |
| ATOM | 623 | OG | SER | A | 15 | −6.667 | 9.971 | 3.401 |
| ATOM | 624 | N | MET | A | 16 | −2.933 | 11.409 | 5.012 |
| ATOM | 625 | CA | MET | A | 16 | −1.518 | 11.700 | 5.047 |
| ATOM | 626 | C | MET | A | 16 | −0.778 | 10.414 | 5.244 |
| ATOM | 627 | O | MET | A | 16 | −1.137 | 9.594 | 6.078 |
| ATOM | 628 | CB | MET | A | 16 | −1.170 | 12.694 | 6.164 |
| ATOM | 629 | CG | MET | A | 16 | −1.848 | 14.042 | 5.974 |
| ATOM | 630 | SD | MET | A | 16 | −1.017 | 15.431 | 6.760 |
| ATOM | 631 | CE | MET | A | 16 | −0.799 | 14.823 | 8.475 |
| ATOM | 632 | N | LEU | A | 17 | 0.238 | 10.231 | 4.426 |
| ATOM | 633 | CA | LEU | A | 17 | 1.077 | 9.065 | 4.508 |
| ATOM | 634 | C | LEU | A | 17 | 2.289 | 9.610 | 5.264 |
| ATOM | 635 | O | LEU | A | 17 | 2.939 | 10.565 | 4.818 |
| ATOM | 636 | CB | LEU | A | 17 | 1.461 | 8.608 | 3.100 |
| ATOM | 637 | CG | LEU | A | 17 | 2.324 | 7.355 | 2.955 |
| ATOM | 638 | CD1 | LEU | A | 17 | 1.553 | 6.145 | 3.445 |
| ATOM | 639 | CD2 | LEU | A | 17 | 2.723 | 7.190 | 1.492 |
| ATOM | 640 | N | TYR | A | 18 | 2.581 | 9.029 | 6.418 |
| ATOM | 641 | CA | TYR | A | 18 | 3.706 | 9.501 | 7.196 |
| ATOM | 642 | C | TYR | A | 18 | 4.434 | 8.333 | 7.835 |
| ATOM | 643 | O | TYR | A | 18 | 4.081 | 7.186 | 7.603 |
| ATOM | 644 | CB | TYR | A | 18 | 3.222 | 10.458 | 8.281 |
| ATOM | 645 | CG | TYR | A | 18 | 2.386 | 9.782 | 9.346 |
| ATOM | 646 | CD1 | TYR | A | 18 | 1.029 | 9.527 | 9.147 |
| ATOM | 647 | CD2 | TYR | A | 18 | 2.961 | 9.379 | 10.550 |
| ATOM | 648 | CE1 | TYR | A | 18 | 0.273 | 8.894 | 10.128 |
| ATOM | 649 | CE2 | TYR | A | 18 | 2.218 | 8.745 | 11.526 |
| ATOM | 650 | CZ | TYR | A | 18 | 0.877 | 8.508 | 11.317 |
| ATOM | 651 | OH | TYR | A | 18 | 0.134 | 7.922 | 12.318 |
| ATOM | 652 | N | LEU | A | 19 | 5.439 | 8.651 | 8.650 |
| ATOM | 653 | CA | LEU | A | 19 | 6.255 | 7.661 | 9.347 |
| ATOM | 654 | C | LEU | A | 19 | 6.210 | 7.946 | 10.847 |
| ATOM | 655 | O | LEU | A | 19 | 6.685 | 8.992 | 11.288 |
| ATOM | 656 | CB | LEU | A | 19 | 7.701 | 7.763 | 8.871 |
| ATOM | 657 | CG | LEU | A | 19 | 7.901 | 7.850 | 7.359 |
| ATOM | 658 | CD1 | LEU | A | 19 | 9.300 | 8.379 | 7.039 |
| ATOM | 659 | CD2 | LEU | A | 19 | 7.669 | 6.482 | 6.748 |

130. The pharmaceutical association according to claim 1, wherein said growth factor receptor-binding compound is a cyclic peptide with between 10 and 60 amino acids, having a growth factor receptor-binding capability, or a cyclic peptidomimetic comprising between 10 and 60 amino acids, having a growth factor receptor-binding capability.

131. The pharmaceutical association according to claim 1, wherein said growth factor receptor-binding compound is selected from the group consisting of any one of peptides of SEQ ID NO: 1 to 13498.

132. A medical composition comprising at least one pharmaceutical association according to claim 1 and at least one medically acceptable excipient, carrier or vehicle.

133. A process for manufacturing a neoplastic disease medicament, said process comprising providing at least one adhesion protein inhibitor and at least one growth factor receptor-binding compound both as defined in claim 1, wherein providing said adhesion protein inhibitor and said growth factor receptor-binding compound manufactures said neoplastic disease medicament.

134. A process for manufacturing a neoplastic disease medicament precursor, said process comprising providing at least one growth factor receptor-binding compound as defined in claim 1, wherein providing said growth factor receptor-binding compound manufactures said neoplastic disease medicament precursor.

135. A method for treating or preventing a neoplastic disease, disorder, condition, pathology, or any symptoms thereof, comprising administering, to a subject in need thereof, an effective amount of a pharmaceutical association according to claim 1.

136. The method according to claim 135, further comprising a step selected from the group consisting of:
reducing or suppressing the gene expression of cyclin D during phase G1 of the cell cycle of the neoplastic cell;
restoring a function of at least one impaired cell cycle checkpoint;
down-regulating the expression or activity of a GTPase;
converting a neoplastic cell into a non-neoplastic cell;
inducing the differentiation of a neoplastic cell;
inducing the quiescence of a neoplastic cell;
inhibiting cell division of a neoplastic cell;
inhibiting cell proliferation of a neoplastic cell;
promoting anti-mitogen activity in a neoplastic cell;
promoting tumor suppressor activity in a neoplastic cell;
promoting anti-oncogenic activity in a neoplastic cell; and
any combinations thereof.

137. The method according to claim 135, wherein said method does not induce the death of said neoplastic cell.

138. A method of converting a neoplastic cell into a non-neoplastic cell, said method comprising the administration to a cell, in-vitro, ex-vivo or in-vivo, of an effective amount of a pharmaceutical association according to claim 1.

139. A method of inducing the formation of a physiologically functional and healthy cell selected from the group consisting of the bone, cartilage, vascular, blood, fibroblast, muscle, neural, epithelial, renal, and retinal cell lineage from a neoplastic cell, comprising administering to a subject in need thereof an effective amount of a pharmaceutical association according to claim 1.

140. A method of determining the effectiveness of a pharmaceutical association for converting a neoplastic cell into a non-neoplastic cell, or for treating a neoplastic disease or at least one symptom thereof, comprising:
the administration of a pharmaceutical association according to claim 1 to a cell;
the measurement of the expression of specific differentiation and/or cancerous markers;
the comparison of the expression of said specific differentiation and/or cancerous markers in the cell to the expression of said specific differentiation and/or cancerous markers in a cell treated with a control; and
determining the effectiveness of the pharmaceutical association relative to the control.

141. A method for treating or preventing a neoplastic disease, disorder, condition, pathology, or any symptoms thereof, comprising administering, to a subject in need thereof, an effective amount of a pharmaceutical association;
wherein said pharmaceutical association comprising at least one growth factor receptor-binding compound, which activates at least one growth factor receptor of a neoplastic cell, and at least one adhesion protein inhibitor which inhibits at least one transmembrane cell adhesion protein of said neoplastic cell;
wherein said growth factor receptor-binding compound is a peptide or a peptidomimetic;
wherein said growth factor receptor-binding compound comprises a peptide with four amino acids PEP1; and
wherein PEP1 is selected from the group consisting of SAIS, SSLS, NAIS, SATS, SPIS, EPIS, SPIN, KPLS, EPLP, EPLT, SNIT, RSVK and RPVQ.

142. A method for treating or preventing a neoplastic disease, disorder, condition, pathology, or any symptoms thereof, comprising administering, to a subject in need thereof, an effective amount of a pharmaceutical association comprising at least one growth factor receptor-binding compound, which activates at least one growth factor receptor of a neoplastic cell, and at least one adhesion protein inhibitor which inhibits at least one transmembrane cell adhesion protein of said neoplastic cell.

143. A pharmaceutical association comprising at least one growth factor receptor-binding compound, which activates at least one growth factor receptor of a neoplastic cell, and at least one adhesion protein inhibitor which inhibits at least one transmembrane cell adhesion protein of said neoplastic cell;
wherein said growth factor receptor-binding compound is a peptide or a peptidomimetic;
wherein said growth factor receptor-binding compound comprises a peptide with four amino acids PEP1; and
wherein PEP1 is selected from the group consisting of SAIS, SSLS, NAIS, SATS, SPIS, EPIS, SPIN, KPLS, EPLP, EPLT, SNIT, RSVK and RPVQ.

144. The method according to claim 135, wherein said at least one growth factor receptor-binding compound and at least one adhesion protein inhibitor are administered together or separately.

145. The method according to claim 142, wherein said at least one growth factor receptor-binding compound and at least one adhesion protein inhibitor are administered together or separately.

146. The pharmaceutical association according to claim 5, wherein said growth factor receptor is selected from the group consisting of epidermal growth factor receptors, fibroblast growth factor receptors, vascular endothelial growth factor receptors, nerve growth factor receptors, insulin receptor family, Trk receptor family, Eph receptor family, AXL receptor family, LTK receptor family, TIE receptor family, ROR receptor family, DDR receptor family, RET receptor family, KLG receptor family, RYK receptor family, MuSK receptor family, hepatocyte growth factor receptors, somatomedin or insulin-like growth factor receptors, platelet-derived growth factor receptors, and transforming growth factor beta superfamily proteins.

147. The pharmaceutical association according to claim 5, wherein said adhesion inhibitor is selected from the group consisting of an integrin inhibitor which inhibits at least one integrin, a syndecan inhibitor which inhibits at least one syndecan, a selectin inhibitor which inhibits at least one selectin, a dystroglycan inhibitor which inhibits at least one dystroglycan, and any combinations thereof.

148. The pharmaceutical association according to claim 5, wherein said growth factor receptor-binding compound is a non-cyclic growth factor receptor-binding compound having a growth factor receptor binding capability and has a molecular weight of less than 4,000 Daltons, or a cyclic growth factor receptor-binding compound having a growth factor receptor binding capability and has a molecular weight of less than 7,000 Daltons.

149. The pharmaceutical association according to claim 5, wherein said growth factor receptor-binding compound is a non-cyclic peptide with between 8 and 30 amino acids having growth factor receptor-binding capability, or is a non-cyclic peptidomimetic having growth factor receptor-binding capability, wherein said peptidomimetic has a molecular weight comprised between 600 and 4,000 Daltons.

150. The pharmaceutical association according to claim 5, wherein said growth factor receptor-binding compound is a cyclic peptide with between 10 and 60 amino acids, having a growth factor receptor-binding capability, or a cyclic peptidomimetic comprising between 10 and 60 amino acids, having a growth factor receptor-binding capability.

The application's sequence listing, which the Patent Office published only in electronic form, follows.

SEQUENCE LISTING (13547 sequences)

SEQ ID NO: 1 - protein, 18 aa, Artificial Sequence
  Non-cyclic GFR-binding peptide
PKPSSAPTQLNAISMLYF

SEQ ID NO: 2 - protein, 20 aa, Artificial Sequence
  Non-cyclic GFR-binding peptide
KVPKASSVPTELSAISTLYL

SEQ ID NO: 3 - protein, 20 aa, Artificial Sequence
  Non-cyclic GFR-binding peptide
KVPKPSSAPTQLSAISTLYL

SEQ ID NO: 4 - protein, 20 aa, Artificial Sequence
  Non-cyclic GFR-binding peptide
KVGKASSVPTKLSAISTLYL

SEQ ID NO: 5 - protein, 20 aa, Artificial Sequence
  Non-cyclic GFR-binding peptide
GSAGPSSVPTKMSAISMLYL

SEQ ID NO: 6 - protein, 20 aa, Artificial Sequence
  Non-cyclic GFR-binding peptide
GAPASSSVPTRLSAISMLYL

SEQ ID NO: 7 - protein, 20 aa, Artificial Sequence
  Non-cyclic GFR-binding peptide
KTPPTSSVPTRLSAISTLYL

SEQ ID NO: 8 - protein, 20 aa, Artificial Sequence
  Non-cyclic GFR-binding peptide
RNVQSRPVPTQLSAISMLYL

SEQ ID NO: 9 - protein, 20 aa, Artificial Sequence
  Non-cyclic GFR-binding peptide
KSASPSSVPTDLSAISTLYL

SEQ ID NO: 10 - protein, 21 aa, Artificial Sequence
  Non-cyclic GFR-binding peptide
RKIPKASSVPTELSAISMLYL

SEQ ID NO: 11 - protein, 20 aa, Artificial Sequence
  Non-cyclic GFR-binding peptide
KIPKASSVPTELSAMSVLYY

SEQ ID NO: 12 - protein, 20 aa, Artificial Sequence
  Non-cyclic GFR-binding peptide
GIPEPSSVPEKMSAMSVLYY

SEQ ID NO: 13 - protein, 20 aa, Artificial Sequence
  Non-cyclic GFR-binding peptide
AVPKASSAVPTLEPMPIVYY

SEQ ID NO: 14 - protein, 20 aa, Artificial Sequence
  Non-cyclic GFR-binding peptide
AAPASSSVPARLSPISILYI

SEQ ID NO: 15 - protein, 20 aa, Artificial Sequence
  Non-cyclic GFR-binding peptide
GIPEPSSVPEKMSPISILYI

SEQ ID NO: 16 - protein, 20 aa, Artificial Sequence
  Non-cyclic GFR-binding peptide
AAPASSSVPARLSPISLLYI

SEQ ID NO: 17 - protein, 20 aa, Artificial Sequence
  Non-cyclic GFR-binding peptide
GSAGPSSVPTKMSPISVLYK

SEQ ID NO: 18 - protein, 20 aa, Artificial Sequence
  Non-cyclic GFR-binding peptide
AVPKASSAPTKLEPLPIVYY

SEQ ID NO: 19 - protein, 20 aa, Artificial Sequence
  Non-cyclic GFR-binding peptide
KIPKASSVSQELEPLTILYY

SEQ ID NO: 20 - protein, 20 aa, Artificial Sequence
  Non-cyclic GFR-binding peptide
KIPKASSVPTELEPLPIVYY

SEQ ID NO: 21 - protein, 20 aa, Artificial Sequence
  Non-cyclic GFR-binding peptide
RNVQSRPTQVQLSPLSILFI

SEQ ID NO: 22 - protein, 20 aa, Artificial Sequence
  Non-cyclic GFR-binding peptide
KVGKASSVPQKLEPLPIVYY

SEQ ID NO: 23 - protein, 20 aa, Artificial Sequence
  Non-cyclic GFR-binding peptide
KIPKASSVPTELEPLPIVYY

SEQ ID NO: 24 - protein, 20 aa, Artificial Sequence
  Non-cyclic GFR-binding peptide
ASAAPSSVPQALEPLPIVYY

SEQ ID NO: 25 - protein, 20 aa, Artificial Sequence
  Non-cyclic GFR-binding peptide
SSVKSQPSRVHHSPISILFI

SEQ ID NO: 26 - protein, 20 aa, Artificial Sequence
  Non-cyclic GFR-binding peptide
SIPKASSVPQELEPLPIVYY

SEQ ID NO: 27 - protein, 20 aa, Artificial Sequence
  Non-cyclic GFR-binding peptide
KIPKAAAVPTELEPLPIVYY

SEQ ID NO: 28 - protein, 20 aa, Artificial Sequence
  Non-cyclic GFR-binding peptide
ASAAPSSVPQALEPLPILYL

SEQ ID NO: 29 - protein, 20 aa, Artificial Sequence
  Non-cyclic GFR-binding peptide
KIPKASSVPTELEPLPILYF

SEQ ID NO: 30 - protein, 20 aa, Artificial Sequence
  Non-cyclic GFR-binding peptide
ASAAPSSVPQALEPLPILYK

SEQ ID NO: 31 - protein, 20 aa, Artificial Sequence
  Non-cyclic GFR-binding peptide
KIPKASSVPTELSATSVLYY

SEQ ID NO: 32 - protein, 20 aa, Artificial Sequence
  Non-cyclic GFR-binding peptide
GIPEPSSVPEKMSATSVLYY

SEQ ID NO: 33 - protein, 20 aa, Artificial Sequence
  Non-cyclic GFR-binding peptide
ASAAPSSVPQALRSVKVAKV

SEQ ID NO: 34 - protein, 20 aa, Artificial Sequence
  Non-cyclic GFR-binding peptide
ASASPSSVPQDLRSVKVAKV

SEQ ID NO: 35 - protein, 13 aa, Artificial Sequence
  Non-cyclic GFR-binding peptide
VSQDLRSVKVAKV

SEQ ID NO: 36 - protein, 18 aa, Artificial Sequence
  Non-cyclic GFR-binding peptide
GTPGPAPTKLSAISMLYL

SEQ ID NO: 37 - protein, 20 aa, Artificial Sequence
  Non-cyclic GFR-binding peptide
KVGKASSMPTKLNAISTLYF

SEQ ID NO: 38 - protein, 20 aa, Artificial Sequence
  Non-cyclic GFR-binding peptide
NDEGLESVPTEESNITMQIM

SEQ ID NO: 39 - protein, 20 aa, Artificial Sequence
  Non-cyclic GFR-binding peptide
TVPKPSSAPTQLSPISILYI

SEQ ID NO: 40 - protein, 20 aa, Artificial Sequence
  Non-cyclic GFR-binding peptide
ASASPSSVPQDLEPLTILYY

SEQ ID NO: 41 - protein, 22 aa, Artificial Sequence
  Non-cyclic GFR-binding peptide
GTPGPKASSVPTELSPISTLYK

SEQ ID NO: 42 - protein, 22 aa, Artificial Sequence
  Non-cyclic GFR-binding peptide
GTPGPKASSVPTELSPISTLYK

SEQ ID NO: 43 - protein, 23 aa, Artificial Sequence
  Non-cyclic GFR-binding peptide
GTPGPPKPSSAPTQLNAISMLYF

SEQ ID NO: 44 - protein, 22 aa, Artificial Sequence
  Non-cyclic GFR-binding peptide
WWFWGKASSVPTELSPISTLYK

SEQ ID NO: 45 - protein, 20 aa, Artificial Sequence
  Non-cyclic GFR-binding peptide
NDEGLESVPTEESNITMQIM

SEQ ID NO: 46 - protein, 8 aa, Artificial Sequence
  Non-cyclic GFR-binding peptide
SPINMLYF

SEQ ID NO: 47 - protein, 13 aa, Artificial Sequence
  Non-cyclic GFR-binding peptide
TPTKMSPINMLYF

SEQ ID NO: 48 - protein, 10 aa, Artificial Sequence
  Non-cyclic GFR-binding peptide
KLSAISTLYL

SEQ ID NO: 49 - protein, 10 aa, Artificial Sequence
  Non-cyclic GFR-binding peptide
KLSAISTLYL

SEQ ID NO: 50 - protein, 16 aa, Artificial Sequence
  Non-cyclic GFR-binding peptide
PSSTPTKMSAISMLYL

SEQ ID NO: 51 - protein, 20 aa, Artificial Sequence
  Non-cyclic GFR-binding peptide
GSAGPSSTPTKMSNITMQIM

SEQ ID NO: 52 - protein, 20 aa, Artificial Sequence
  Non-cyclic GFR-binding peptide
AAPASSSVPARLSNITMQIM

SEQ ID NO: 53 - protein, 20 aa, Artificial Sequence
  Non-cyclic GFR-binding peptide
KIPKASSTPTELSPINMLYF

SEQ ID NO: 54 - protein, 20 aa, Artificial Sequence
  Non-cyclic GFR-binding peptide
SIPKASSTPTELSPINMLYF

SEQ ID NO: 55 - protein, 18 aa, Artificial Sequence
  Non-cyclic GFR-binding peptide
TKPTSTPTKLSPINMLYF

SEQ ID NO: 56 - protein, 20 aa, Artificial Sequence
  Non-cyclic GFR-binding peptide
NDEGLESVPTEESAISMLYL

SEQ ID NO: 57 - protein, 20 aa, Artificial Sequence
  Non-cyclic GFR-binding peptide
SSVKSQPSRVHHSPISILFI

SEQ ID NO: 58 - protein, 20 aa, Artificial Sequence
  Non-cyclic GFR-binding peptide
ASASPSSVSQDLSSLSILFF

SEQ ID NO: 59 - protein, 20 aa, Artificial Sequence
  Non-cyclic GFR-binding peptide
VVPKPSSAPTQLEPISILYL

SEQ ID NO: 60 - protein, 20 aa, Artificial Sequence
  Non-cyclic GFR-binding peptide
SSVKSQPSRVHHKPLSMLYV

SEQ ID NO: 61 - protein, 20 aa, Artificial Sequence
  Non-cyclic GFR-binding peptide
KVGKASSVPTKLEPISILYL

SEQ ID NO: 62 - protein, 20 aa, Artificial Sequence
  Non-cyclic GFR-binding peptide
SSVKSQPSRVHHKPLSMLYV

SEQ ID NO: 63 - protein, 20 aa, Artificial Sequence
  Non-cyclic GFR-binding peptide
NDEGLESVPTEERSVKVAKV

SEQ ID NO: 64 - protein, 18 aa, Artificial Sequence
  Non-cyclic GFR-binding peptide
FYLMSIANLQTPASSPKP

SEQ ID NO: 65 - protein, 20 aa, Artificial Sequence
  Non-cyclic GFR-binding peptide
LYLTSIASLETPVSSAKPVK

SEQ ID NO: 66 - protein, 20 aa, Artificial Sequence
  Non-cyclic GFR-binding peptide
LYLTSIASLQTPASSPKPVK

SEQ ID NO: 67 - protein, 20 aa, Artificial Sequence
  Non-cyclic GFR-binding peptide
LYLTSIASLKTPVSSAKGVK

SEQ ID NO: 68 - protein, 20 aa, Artificial Sequence
  Non-cyclic GFR-binding peptide
LYLMSIASMKTPVSSPGASG

SEQ ID NO: 69 - protein, 20 aa, Artificial Sequence
  Non-cyclic GFR-binding peptide
LYLMSIASLRTPVSSSAPAG

SEQ ID NO: 70 - protein, 20 aa, Artificial Sequence
  Non-cyclic GFR-binding peptide
LYLTSIASLRTPVSSTPPTK

SEQ ID NO: 71 - protein, 20 aa, Artificial Sequence
  Non-cyclic GFR-binding peptide
LYLMSIASLQTPVPRSQVNR

SEQ ID NO: 72 - protein, 20 aa, Artificial Sequence
  Non-cyclic GFR-binding peptide
LYLTSIASLDTPVSSPSASK

SEQ ID NO: 73 - protein, 21 aa, Artificial Sequence
  Non-cyclic GFR-binding peptide
LYLMSIASLETPVSSAKPIKR

SEQ ID NO: 74 - protein, 20 aa, Artificial Sequence
  Non-cyclic GFR-binding peptide
YYLVSMASLETPVSSAKPIK

SEQ ID NO: 75 - protein, 20 aa, Artificial Sequence
  Non-cyclic GFR-binding peptide
YYLVSMASMKEPVSSPEPIG

SEQ ID NO: 76 - protein, 20 aa, Artificial Sequence
  Non-cyclic GFR-binding peptide
YYVIPMPELTPVASSAKPVA

SEQ ID NO: 77 - protein, 20 aa, Artificial Sequence
  Non-cyclic GFR-binding peptide
IYLISIPSLRAPVSSSAPAA

SEQ ID NO: 78 - protein, 20 aa, Artificial Sequence
  Non-cyclic GFR-binding peptide
IYLISIPSMKEPVSSPEPIG

SEQ ID NO: 79 - protein, 20 aa, Artificial Sequence
  Non-cyclic GFR-binding peptide
IYLLSIPSLRAPVSSSAPAA

SEQ ID NO: 80 - protein, 20 aa, Artificial Sequence
  Non-cyclic GFR-binding peptide
KYLVSIPSMKTPVSSPGASG

SEQ ID NO: 81 - protein, 20 aa, Artificial Sequence
  Non-cyclic GFR-binding peptide
YYVIPLPELKTPASSAKPVA

SEQ ID NO: 82 - protein, 20 aa, Artificial Sequence
  Non-cyclic GFR-binding peptide
YYLITLPELEQSVSSAKPIK

SEQ ID NO: 83 - protein, 20 aa, Artificial Sequence
  Non-cyclic GFR-binding peptide
YYVIPLPELETPVSSAKPIK

SEQ ID NO: 84 - protein, 20 aa, Artificial Sequence
  Non-cyclic GFR-binding peptide
IFLISLPSLQVQTPRSQVNR

SEQ ID NO: 85 - protein, 20 aa, Artificial Sequence
  Non-cyclic GFR-binding peptide
YYVIPLPELKQPVSSAKGVK

SEQ ID NO: 86 - protein, 20 aa, Artificial Sequence
  Non-cyclic GFR-binding peptide
YYVIPLPELETPVSSAKPIK

SEQ ID NO: 87 - protein, 20 aa, Artificial Sequence
  Non-cyclic GFR-binding peptide
YYVIPLPELAQPVSSPAASA

SEQ ID NO: 88 - protein, 20 aa, Artificial Sequence
  Non-cyclic GFR-binding peptide
IFLISIPSHHVRSPQSKVSS

SEQ ID NO: 89 - protein, 20 aa, Artificial Sequence
  Non-cyclic GFR-binding peptide
YYVIPLPELEQPVSSAKPIS

SEQ ID NO: 90 - protein, 20 aa, Artificial Sequence
  Non-cyclic GFR-binding peptide
YYVIPLPELETPVAAAKPIK

SEQ ID NO: 91 - protein, 20 aa, Artificial Sequence
  Non-cyclic GFR-binding peptide
LYLIPLPELAQPVSSPAASA

SEQ ID NO: 92 - protein, 20 aa, Artificial Sequence
  Non-cyclic GFR-binding peptide
FYLIPLPELETPVSSAKPIK

SEQ ID NO: 93 - protein, 20 aa, Artificial Sequence
  Non-cyclic GFR-binding peptide
KYLIPLPELAQPVSSPAASA

SEQ ID NO: 94 - protein, 20 aa, Artificial Sequence
  Non-cyclic GFR-binding peptide
YYLVSTASLETPVSSAKPIK

SEQ ID NO: 95 - protein, 20 aa, Artificial Sequence
  Non-cyclic GFR-binding peptide
YYLVSTASMKEPVSSPEPIG

SEQ ID NO: 96 - protein, 20 aa, Artificial Sequence
  Non-cyclic GFR-binding peptide
VKAVKVSRLAQPVSSPAASA

SEQ ID NO: 97 - protein, 20 aa, Artificial Sequence
  Non-cyclic GFR-binding peptide
VKAVKVSRLDQPVSSPSASA

SEQ ID NO: 98 - protein, 13 aa, Artificial Sequence
  Non-cyclic GFR-binding peptide
VKAVKVSRLDQSV

SEQ ID NO: 99 - protein, 18 aa, Artificial Sequence
  Non-cyclic GFR-binding peptide
LYLMSIASLKTPAPGPTG

SEQ ID NO: 100 - protein, 20 aa, Artificial Sequence
  Non-cyclic GFR-binding peptide
FYLTSIANLKTPMSSAKGVK

SEQ ID NO: 101 - protein, 20 aa, Artificial Sequence
  Non-cyclic GFR-binding peptide
MIQMTINSEETPVSELGEDN

SEQ ID NO: 102 - protein, 20 aa, Artificial Sequence
  Non-cyclic GFR-binding peptide
IYLISIPSLQTPASSPKPVT

SEQ ID NO: 103 - protein, 20 aa, Artificial Sequence
  Non-cyclic GFR-binding peptide
YYLITLPELDQPVSSPSASA

SEQ ID NO: 104 - protein, 22 aa, Artificial Sequence
  Non-cyclic GFR-binding peptide
KYLTSIPSLETPVSSAKPGPTG

SEQ ID NO: 105 - protein, 22 aa, Artificial Sequence
  Non-cyclic GFR-binding peptide
KYLTSIPSLETPVSSAKPGPTG

SEQ ID NO: 106 - protein, 23 aa, Artificial Sequence
  Non-cyclic GFR-binding peptide
FYLMSIANLQTPASSPKPPGPTG

SEQ ID NO: 107 - protein, 22 aa, Artificial Sequence
  Non-cyclic GFR-binding peptide
KYLTSIPSLETPVSSAKGWFWW

SEQ ID NO: 108 - protein, 20 aa, Artificial Sequence
  Non-cyclic GFR-binding peptide
MIQMTINSEETPVSELGEDN

SEQ ID NO: 109 - protein, 8 aa, Artificial Sequence
  Non-cyclic GFR-binding peptide
FYLMNIPS

SEQ ID NO: 110 - protein, 13 aa, Artificial Sequence
  Non-cyclic GFR-binding peptide
FYLMNIPSMKTPT

SEQ ID NO: 111 - protein, 10 aa, Artificial Sequence
  Non-cyclic GFR-binding peptide
LYLTSIASLK

SEQ ID NO: 112 - protein, 10 aa, Artificial Sequence
  Non-cyclic GFR-binding peptide
LYLTSIASLK

SEQ ID NO: 113 - protein, 16 aa, Artificial Sequence
  Non-cyclic GFR-binding peptide
LYLMSIASMKTPTSSP

SEQ ID NO: 114 - protein, 20 aa, Artificial Sequence
  Non-cyclic GFR-binding peptide
MIQMTINSMKTPTSSPGASG

SEQ ID NO: 115 - protein, 20 aa, Artificial Sequence
  Non-cyclic GFR-binding peptide
MIQMTINSLRAPVSSSAPAA

SEQ ID NO: 116 - protein, 20 aa, Artificial Sequence
  Non-cyclic GFR-binding peptide
FYLMNIPSLETPTSSAKPIK

SEQ ID NO: 117 - protein, 20 aa, Artificial Sequence
  Non-cyclic GFR-binding peptide
FYLMNIPSLETPTSSAKPIS

SEQ ID NO: 118 - protein, 18 aa, Artificial Sequence
  Non-cyclic GFR-binding peptide
FYLMNIPSLKTPTSTPKT

SEQ ID NO: 119 - protein, 20 aa, Artificial Sequence
  Non-cyclic GFR-binding peptide
LYLMSIASEETPVSELGEDN

SEQ ID NO: 120 - protein, 20 aa, Artificial Sequence
  Non-cyclic GFR-binding peptide
IFLISIPSHHVRSPQSKVSS

SEQ ID NO: 121 - protein, 20 aa, Artificial Sequence
  Non-cyclic GFR-binding peptide
FFLISLSSLDQSVSSPSASA

SEQ ID NO: 122 - protein, 20 aa, Artificial Sequence
  Non-cyclic GFR-binding peptide
LYLISIPELQTPASSPKPVV

SEQ ID NO: 123 - protein, 20 aa, Artificial Sequence
  Non-cyclic GFR-binding peptide
VYLMSLPKHHVRSPQSKVSS

SEQ ID NO: 124 - protein, 20 aa, Artificial Sequence
  Non-cyclic GFR-binding peptide
LYLISIPELKTPVSSAKGVK

SEQ ID NO: 125 - protein, 20 aa, Artificial Sequence
  Non-cyclic GFR-binding peptide
VYLMSLPKHHVRSPQSKVSS

SEQ ID NO: 126 - protein, 20 aa, Artificial Sequence
  Non-cyclic GFR-binding peptide
VKAVKVSREETPVSELGEDN

SEQ ID NO: 127 - protein, 20 aa, Artificial Sequence
  Non-cyclic GFR-binding peptide
CSAAPSSVPTALSAISMLYL

SEQ ID NO: 128 - protein, 20 aa, Artificial Sequence
  Non-cyclic GFR-binding peptide
GVPKPSSVPTKLSAISTLYL

SEQ ID NO: 129 - protein, 20 aa, Artificial Sequence
  Non-cyclic GFR-binding peptide
GIPEPSSVPTKMSAISMLYL

SEQ ID NO: 130 - protein, 20 aa, Artificial Sequence
  Non-cyclic GFR-binding peptide
HVTKPTSVPTKLSAISMLYL

SEQ ID NO: 131 - protein, 20 aa, Artificial Sequence
  Non-cyclic GFR-binding peptide
YVPKPSSVPTKLSAISMLYL

SEQ ID NO: 132 - protein, 20 aa, Artificial Sequence
  Non-cyclic GFR-binding peptide
TVPKPSSVPTQLSAISMLYL

SEQ ID NO: 133 - protein, 20 aa, Artificial Sequence
  Non-cyclic GFR-binding peptide
AVPKASSVPTKLSAISMLYL

SEQ ID NO: 134 - protein, 20 aa, Artificial Sequence
  Non-cyclic GFR-binding peptide
KASKASSVPTKLSAISMLYL

SEQ ID NO: 135 - protein, 20 aa, Artificial Sequence
  Non-cyclic GFR-binding peptide
HVPKPSSVPTKLSAISMLYL

SEQ ID NO: 136 - protein, 20 aa, Artificial Sequence
  Non-cyclic GFR-binding peptide
ASAAPSSVPTALSAISMLYL

SEQ ID NO: 137 - protein, 20 aa, Artificial Sequence
  Non-cyclic GFR-binding peptide
ASASPSSVPTDLSAISMLYL

SEQ ID NO: 138 - protein, 20 aa, Artificial Sequence
  Non-cyclic GFR-binding peptide
GIPEPSSVPEKMSAISMLYL

SEQ ID NO: 139 - protein, 20 aa, Artificial Sequence
  Non-cyclic GFR-binding peptide
HVTKPTSAPTKLSAISMLYL

SEQ ID NO: 140 - protein, 20 aa, Artificial Sequence
  Non-cyclic GFR-binding peptide
YVPKPSSAPTKLSAISMLYL

SEQ ID NO: 141 - protein, 20 aa, Artificial Sequence
  Non-cyclic GFR-binding peptide
GSAGPSSTPTKMSAISMLYL

SEQ ID NO: 142 - protein, 20 aa, Artificial Sequence
  Non-cyclic GFR-binding peptide
AAPASSSVPARLSAISMLYL

SEQ ID NO: 143 - protein, 20 aa, Artificial Sequence
  Non-cyclic GFR-binding peptide
RVPSTSSAPVKTSAISMLYL

SEQ ID NO: 144 - protein, 20 aa, Artificial Sequence
  Non-cyclic GFR-binding peptide
ASAAPSSVPQALSAISMLYL

SEQ ID NO: 145 - protein, 20 aa, Artificial Sequence
  Non-cyclic GFR-binding peptide
ASASPSSVPQDLSAISMLYL

SEQ ID NO: 146 - protein, 20 aa, Artificial Sequence
  Non-cyclic GFR-binding peptide
SSVKSQPSRVHHSAISMLYL

SEQ ID NO: 147 - protein, 20 aa, Artificial Sequence
  Non-cyclic GFR-binding peptide
KIPKASSVPEELSSLSILFF

SEQ ID NO: 148 - protein, 20 aa, Artificial Sequence
  Non-cyclic GFR-binding peptide
SIPKASSVPEELSSLSILFF

SEQ ID NO: 149 - protein, 20 aa, Artificial Sequence
  Non-cyclic GFR-binding peptide
YVPKPSSVPEKLSSLSILFF

SEQ ID NO: 150 - protein, 20 aa, Artificial Sequence
  Non-cyclic GFR-binding peptide
TVPKPSSVPEQLSSLSILFF

SEQ ID NO: 151 - protein, 20 aa, Artificial Sequence
  Non-cyclic GFR-binding peptide
AVPKASSVPEKLSSLSILFF

SEQ ID NO: 152 - protein, 20 aa, Artificial Sequence
  Non-cyclic GFR-binding peptide
KVGKASSVPEKLSSLSILFF

SEQ ID NO: 153 - protein, 20 aa, Artificial Sequence
  Non-cyclic GFR-binding peptide
KASKASSVPEKLSSLSILFF

SEQ ID NO: 154 - protein, 20 aa, Artificial Sequence
  Non-cyclic GFR-binding peptide
AAPASSSVPERLSSLSILFF

SEQ ID NO: 155 - protein, 20 aa, Artificial Sequence
  Non-cyclic GFR-binding peptide
STPPTSSVPERLSSLSILFF

SEQ ID NO: 156 - protein, 20 aa, Artificial Sequence
  Non-cyclic GFR-binding peptide
HVPKPSSVPEKLSSLSILFF

SEQ ID NO: 157 - protein, 20 aa, Artificial Sequence
  Non-cyclic GFR-binding peptide
RVPSTSSVPEKTSSLSILFF

SEQ ID NO: 158 - protein, 20 aa, Artificial Sequence
  Non-cyclic GFR-binding peptide
ASAAPSSVPEALSSLSILFF

SEQ ID NO: 159 - protein, 20 aa, Artificial Sequence
  Non-cyclic GFR-binding peptide
ASASPSSVPEDLSSLSILFF

SEQ ID NO: 160 - protein, 20 aa, Artificial Sequence
  Non-cyclic GFR-binding peptide
KIPKASSVPTELSSLSILFF

SEQ ID NO: 161 - protein, 20 aa, Artificial Sequence
  Non-cyclic GFR-binding peptide
SIPKASSVPTELSSLSILFF

SEQ ID NO: 162 - protein, 20 aa, Artificial Sequence
  Non-cyclic GFR-binding peptide
HVTKPTSAPTKLSSLSILFF

SEQ ID NO: 163 - protein, 20 aa, Artificial Sequence
  Non-cyclic GFR-binding peptide
YVPKPSSAPTKLSSLSILFF

SEQ ID NO: 164 - protein, 20 aa, Artificial Sequence
  Non-cyclic GFR-binding peptide
TVPKPSSAPTQLSSLSILFF

SEQ ID NO: 165 - protein, 20 aa, Artificial Sequence
  Non-cyclic GFR-binding peptide
AVPKASSAPTKLSSLSILFF

SEQ ID NO: 166 - protein, 20 aa, Artificial Sequence
  Non-cyclic GFR-binding peptide
KVGKASSVPTKLSSLSILFF

SEQ ID NO: 167 - protein, 20 aa, Artificial Sequence
  Non-cyclic GFR-binding peptide
KASKASSVPTKLSSLSILFF

SEQ ID NO: 168 - protein, 20 aa, Artificial Sequence
  Non-cyclic GFR-binding peptide
GSAGPSSTPTKMSSLSILFF

SEQ ID NO: 169 - protein, 20 aa, Artificial Sequence
  Non-cyclic GFR-binding peptide
AAPASSSVPARLSSLSILFF

SEQ ID NO: 170 - protein, 20 aa, Artificial Sequence
  Non-cyclic GFR-binding peptide
STPPTSSVPTRLSSLSILFF

SEQ ID NO: 171 - protein, 20 aa, Artificial Sequence
  Non-cyclic GFR-binding peptide
HVPKPSSAPTKLSSLSILFF

SEQ ID NO: 172 - protein, 20 aa, Artificial Sequence
  Non-cyclic GFR-binding peptide
RVPSTSSAPVKTSSLSILFF

SEQ ID NO: 173 - protein, 20 aa, Artificial Sequence
  Non-cyclic GFR-binding peptide
ASASPSSVPQDLSSLSILFF

SEQ ID NO: 174 - protein, 20 aa, Artificial Sequence
  Non-cyclic GFR-binding peptide
NDEGLESVPTGQSSLSILFF

SEQ ID NO: 175 - protein, 20 aa, Artificial Sequence
  Non-cyclic GFR-binding peptide
SSVKSQPSRVHHSSLSILFF

SEQ ID NO: 176 - protein, 20 aa, Artificial Sequence
  Non-cyclic GFR-binding peptide
RNVQSRPTQVQLSSLSILFF

SEQ ID NO: 177 - protein, 20 aa, Artificial Sequence
  Non-cyclic GFR-binding peptide
KIPKASSAPTELNAISVLYF

SEQ ID NO: 178 - protein, 20 aa, Artificial Sequence
  Non-cyclic GFR-binding peptide
GIPEPSSAPTKMNAISVLYF

SEQ ID NO: 179 - protein, 20 aa, Artificial Sequence
  Non-cyclic GFR-binding peptide
SIPKASSAPTELNAISVLYF

SEQ ID NO: 180 - protein, 20 aa, Artificial Sequence
  Non-cyclic GFR-binding peptide
AVPKASSAPTKLNAISVLYF

SEQ ID NO: 181 - protein, 20 aa, Artificial Sequence
  Non-cyclic GFR-binding peptide
KVGKASSAPTKLNAISVLYF

SEQ ID NO: 182 - protein, 20 aa, Artificial Sequence
  Non-cyclic GFR-binding peptide
KASKASSAPTKLNAISVLYF

SEQ ID NO: 183 - protein, 20 aa, Artificial Sequence
  Non-cyclic GFR-binding peptide
GSAGPSSAPTKMNAISVLYF

SEQ ID NO: 184 - protein, 20 aa, Artificial Sequence
  Non-cyclic GFR-binding peptide
AAPASSSAPTRLNAISVLYF

SEQ ID NO: 185 - protein, 20 aa, Artificial Sequence
  Non-cyclic GFR-binding peptide
STPPTSSAPTRLNAISVLYF

SEQ ID NO: 186 - protein, 20 aa, Artificial Sequence
  Non-cyclic GFR-binding peptide
RVPSTSSAPTKTNAISVLYF

SEQ ID NO: 187 - protein, 20 aa, Artificial Sequence
  Non-cyclic GFR-binding peptide
ASAAPSSAPTALNAISVLYF

SEQ ID NO: 188 - protein, 20 aa, Artificial Sequence
  Non-cyclic GFR-binding peptide
ASASPSSAPTDLNAISVLYF

SEQ ID NO: 189 - protein, 20 aa, Artificial Sequence
  Non-cyclic GFR-binding peptide
KIPKASSVPTELNAISVLYF

SEQ ID NO: 190 - protein, 20 aa, Artificial Sequence
  Non-cyclic GFR-binding peptide
GIPEPSSVPEKMNAISVLYF

SEQ ID NO: 191 - protein, 20 aa, Artificial Sequence
  Non-cyclic GFR-binding peptide
SIPKASSVPTELNAISVLYF

SEQ ID NO: 192 - protein, 20 aa, Artificial Sequence
  Non-cyclic GFR-binding peptide
KVGKASSVPTKLNAISVLYF

SEQ ID NO: 193 - protein, 20 aa, Artificial Sequence
  Non-cyclic GFR-binding peptide
KASKASSVPTKLNAISVLYF

SEQ ID NO: 194 - protein, 20 aa, Artificial Sequence
  Non-cyclic GFR-binding peptide
GSAGPSSTPTKMNAISVLYF

SEQ ID NO: 195 - protein, 20 aa, Artificial Sequence
  Non-cyclic GFR-binding peptide
AAPASSSVPARLNAISVLYF

SEQ ID NO: 196 - protein, 20 aa, Artificial Sequence
  Non-cyclic GFR-binding peptide
STPPTSSVPTRLNAISVLYF

SEQ ID NO: 197 - protein, 20 aa, Artificial Sequence
  Non-cyclic GFR-binding peptide
RVPSTSSAPVKTNAISVLYF

SEQ ID NO: 198 - protein, 20 aa, Artificial Sequence
  Non-cyclic GFR-binding peptide
ASAAPSSVPQALNAISVLYF

SEQ ID NO: 199 - protein, 20 aa, Artificial Sequence
  Non-cyclic GFR-binding peptide
ASASPSSVSQDLNAISVLYF

SEQ ID NO: 200 - protein, 20 aa, Artificial Sequence
  Non-cyclic GFR-binding peptide
ASASPSSVPQDLNAISVLYF

SEQ ID NO: 201 - protein, 20 aa, Artificial Sequence
  Non-cyclic GFR-binding peptide
NDEGLESVPTEENAISVLYF

SEQ ID NO: 202 - protein, 20 aa, Artificial Sequence
  Non-cyclic GFR-binding peptide
SSVKSQPSRVHHNAISVLYF

SEQ ID NO: 203 - protein, 20 aa, Artificial Sequence
  Non-cyclic GFR-binding peptide
KIPKASSAPTELSATSVLYY

SEQ ID NO: 204 - protein, 20 aa, Artificial Sequence
  Non-cyclic GFR-binding peptide
GIPEPSSAPTKMSATSVLYY

SEQ ID NO: 205 - protein, 20 aa, Artificial Sequence
  Non-cyclic GFR-binding peptide
SIPKASSAPTELSATSVLYY

SEQ ID NO: 206 - protein, 20 aa, Artificial Sequence
  Non-cyclic GFR-binding peptide
HVTKPTSAPTKLSATSVLYY

SEQ ID NO: 207 - protein, 20 aa, Artificial Sequence
  Non-cyclic GFR-binding peptide
YVPKPSSAPTKLSATSVLYY

SEQ ID NO: 208 - protein, 20 aa, Artificial Sequence
  Non-cyclic GFR-binding peptide
TVPKPSSAPTQLSATSVLYY

SEQ ID NO: 209 - protein, 20 aa, Artificial Sequence
  Non-cyclic GFR-binding peptide
KVGKASSAPTKLSATSVLYY

SEQ ID NO: 210 - protein, 20 aa, Artificial Sequence
  Non-cyclic GFR-binding peptide
KASKASSAPTKLSATSVLYY

SEQ ID NO: 211 - protein, 20 aa, Artificial Sequence
  Non-cyclic GFR-binding peptide
GSAGPSSAPTKMSATSVLYY

SEQ ID NO: 212 - protein, 20 aa, Artificial Sequence
  Non-cyclic GFR-binding peptide
AAPASSSAPTRLSATSVLYY

SEQ ID NO: 213 - protein, 20 aa, Artificial Sequence
  Non-cyclic GFR-binding peptide
STPPTSSAPTRLSATSVLYY

SEQ ID NO: 214 - protein, 20 aa, Artificial Sequence
  Non-cyclic GFR-binding peptide
HVPKPSSAPTKLSATSVLYY

SEQ ID NO: 215 - protein, 20 aa, Artificial Sequence
  Non-cyclic GFR-binding peptide
SIPKASSVPTELSATSVLYY

SEQ ID NO: 216 - protein, 20 aa, Artificial Sequence
  Non-cyclic GFR-binding peptide
KVGKASSVPTKLSATSVLYY

SEQ ID NO: 217 - protein, 20 aa, Artificial Sequence
  Non-cyclic GFR-binding peptide
KASKASSVPTKLSATSVLYY

SEQ ID NO: 218 - protein, 20 aa, Artificial Sequence
  Non-cyclic GFR-binding peptide
GSAGPSSTPTKMSATSVLYY

SEQ ID NO: 219 - protein, 20 aa, Artificial Sequence
  Non-cyclic GFR-binding peptide
AAPASSSVPARLSATSVLYY

SEQ ID NO: 220 - protein, 20 aa, Artificial Sequence
  Non-cyclic GFR-binding peptide
STPPTSSVPTRLSATSVLYY

SEQ ID NO: 221 - protein, 20 aa, Artificial Sequence
  Non-cyclic GFR-binding peptide
RVPSTSSAPVKTSATSVLYY

SEQ ID NO: 222 - protein, 20 aa, Artificial Sequence
  Non-cyclic GFR-binding peptide
ASAAPSSVPQALSATSVLYY

SEQ ID NO: 223 - protein, 20 aa, Artificial Sequence
  Non-cyclic GFR-binding peptide
ASASPSSVSQDLSATSVLYY

SEQ ID NO: 224 - protein, 20 aa, Artificial Sequence
  Non-cyclic GFR-binding peptide
ASASPSSVPQDLSATSVLYY

SEQ ID NO: 225 - protein, 20 aa, Artificial Sequence
  Non-cyclic GFR-binding peptide
NDEGLESVPTEESATSVLYY

SEQ ID NO: 226 - protein, 20 aa, Artificial Sequence
  Non-cyclic GFR-binding peptide
NDEGLESVPTGQSATSVLYY

SEQ ID NO: 227 - protein, 20 aa, Artificial Sequence
  Non-cyclic GFR-binding peptide
SSVKSQPSRVHHSATSVLYY

SEQ ID NO: 228 - protein, 20 aa, Artificial Sequence
  Non-cyclic GFR-binding peptide
RNVQSRPTQVQLSATSVLYY

SEQ ID NO: 229 - protein, 20 aa, Artificial Sequence
  Non-cyclic GFR-binding peptide
GIPEPSSVPTKMSPISVLYK

SEQ ID NO: 230 - protein, 20 aa, Artificial Sequence
  Non-cyclic GFR-binding peptide
SIPKASSVPTELSPISVLYK

SEQ ID NO: 231 - protein, 20 aa, Artificial Sequence
  Non-cyclic GFR-binding peptide
HVTKPTSVPTKLSPISVLYK

SEQ ID NO: 232 - protein, 20 aa, Artificial Sequence
  Non-cyclic GFR-binding peptide
YVPKPSSVPTKLSPISVLYK

SEQ ID NO: 233 - protein, 20 aa, Artificial Sequence
  Non-cyclic GFR-binding peptide
TVPKPSSVPTQLSPISVLYK

SEQ ID NO: 234 - protein, 20 aa, Artificial Sequence
  Non-cyclic GFR-binding peptide
AVPKASSVPTKLSPISVLYK

SEQ ID NO: 235 - protein, 20 aa, Artificial Sequence
  Non-cyclic GFR-binding peptide
KASKASSVPTKLSPISVLYK

SEQ ID NO: 236 - protein, 20 aa, Artificial Sequence
  Non-cyclic GFR-binding peptide
AAPASSSVPTRLSPISVLYK

SEQ ID NO: 237 - protein, 20 aa, Artificial Sequence
  Non-cyclic GFR-binding peptide
STPPTSSVPTRLSPISVLYK

SEQ ID NO: 238 - protein, 20 aa, Artificial Sequence
  Non-cyclic GFR-binding peptide
RVPSTSSVPTKTSPISVLYK

SEQ ID NO: 239 - protein, 20 aa, Artificial Sequence
  Non-cyclic GFR-binding peptide
ASAAPSSVPTALSPISVLYK

SEQ ID NO: 240 - protein, 20 aa, Artificial Sequence
  Non-cyclic GFR-binding peptide
ASASPSSVPTDLSPISVLYK

SEQ ID NO: 241 - protein, 20 aa, Artificial Sequence
  Non-cyclic GFR-binding peptide
GIPEPSSVPEKMSPISVLYK

SEQ ID NO: 242 - protein, 20 aa, Artificial Sequence
  Non-cyclic GFR-binding peptide
HVTKPTSAPTKLSPISVLYK

SEQ ID NO: 243 - protein, 20 aa, Artificial Sequence
  Non-cyclic GFR-binding peptide
YVPKPSSAPTKLSPISVLYK

SEQ ID NO: 244 - protein, 20 aa, Artificial Sequence
  Non-cyclic GFR-binding peptide
TVPKPSSAPTQLSPISVLYK

SEQ ID NO: 245 - protein, 20 aa, Artificial Sequence
  Non-cyclic GFR-binding peptide
AVPKASSAPTKLSPISVLYK

SEQ ID NO: 246 - protein, 20 aa, Artificial Sequence
  Non-cyclic GFR-binding peptide
GSAGPSSTPTKMSPISVLYK

SEQ ID NO: 247 - protein, 20 aa, Artificial Sequence
  Non-cyclic GFR-binding peptide
AAPASSSVPARLSPISVLYK

SEQ ID NO: 248 - protein, 20 aa, Artificial Sequence
  Non-cyclic GFR-binding peptide
HVPKPSSAPTKLSPISVLYK

SEQ ID NO: 249 - protein, 20 aa, Artificial Sequence
  Non-cyclic GFR-binding peptide
RVPSTSSAPVKTSPISVLYK

SEQ ID NO: 250 - protein, 20 aa, Artificial Sequence
  Non-cyclic GFR-binding peptide
ASAAPSSVPQALSPISVLYK

SEQ ID NO: 251 - protein, 20 aa, Artificial Sequence
  Non-cyclic GFR-binding peptide
ASASPSSVSQDLSPISVLYK

SEQ ID NO: 252 - protein, 20 aa, Artificial Sequence
  Non-cyclic GFR-binding peptide
ASASPSSVPQDLSPISVLYK

SEQ ID NO: 253 - protein, 20 aa, Artificial Sequence
  Non-cyclic GFR-binding peptide
SSVKSQPSRVHHSPISVLYK

SEQ ID NO: 254 - protein, 20 aa, Artificial Sequence
  Non-cyclic GFR-binding peptide
RNVQSRPTQVQLSPISVLYK

SEQ ID NO: 255 - protein, 20 aa, Artificial Sequence
  Non-cyclic GFR-binding peptide
KIPKASSVPTELEPISILYL

SEQ ID NO: 256 - protein, 20 aa, Artificial Sequence
  Non-cyclic GFR-binding peptide
GIPEPSSVPTKMEPISILYL

SEQ ID NO: 257 - protein, 20 aa, Artificial Sequence
  Non-cyclic GFR-binding peptide
SIPKASSVPTELEPISILYL

SEQ ID NO: 258 - protein, 20 aa, Artificial Sequence
  Non-cyclic GFR-binding peptide
HVTKPTSVPTKLEPISILYL

SEQ ID NO: 259 - protein, 20 aa, Artificial Sequence
  Non-cyclic GFR-binding peptide
YVPKPSSVPTKLEPISILYL

SEQ ID NO: 260 - protein, 20 aa, Artificial Sequence
  Non-cyclic GFR-binding peptide
TVPKPSSVPTQLEPISILYL

SEQ ID NO: 261 - protein, 20 aa, Artificial Sequence
  Non-cyclic GFR-binding peptide
AVPKASSVPTKLEPISILYL

SEQ ID NO: 262 - protein, 20 aa, Artificial Sequence
  Non-cyclic GFR-binding peptide
GSAGPSSVPTKMEPISILYL

SEQ ID NO: 263 - protein, 20 aa, Artificial Sequence
  Non-cyclic GFR-binding peptide
AAPASSSVPTRLEPISILYL

SEQ ID NO: 264 - protein, 20 aa, Artificial Sequence
  Non-cyclic GFR-binding peptide
STPPTSSVPTRLEPISILYL

SEQ ID NO: 265 - protein, 20 aa, Artificial Sequence
  Non-cyclic GFR-binding peptide
HVPKPSSVPTKLEPISILYL

SEQ ID NO: 266 - protein, 20 aa, Artificial Sequence
  Non-cyclic GFR-binding peptide
RVPSTSSVPTKTEPISILYL

SEQ ID NO: 267 - protein, 20 aa, Artificial Sequence
  Non-cyclic GFR-binding peptide
ASAAPSSVPTALEPISILYL

SEQ ID NO: 268 - protein, 20 aa, Artificial Sequence
  Non-cyclic GFR-binding peptide
ASASPSSVPTDLEPISILYL

SEQ ID NO: 269 - protein, 20 aa, Artificial Sequence
  Non-cyclic GFR-binding peptide
GIPEPSSVPEKMEPISILYL

SEQ ID NO: 270 - protein, 20 aa, Artificial Sequence
  Non-cyclic GFR-binding peptide
HVTKPTSAPTKLEPISILYL

SEQ ID NO: 271 - protein, 20 aa, Artificial Sequence
  Non-cyclic GFR-binding peptide
YVPKPSSAPTKLEPISILYL

SEQ ID NO: 272 - protein, 20 aa, Artificial Sequence
  Non-cyclic GFR-binding peptide
TVPKPSSAPTQLEPISILYL

SEQ ID NO: 273 - protein, 20 aa, Artificial Sequence
  Non-cyclic GFR-binding peptide
GSAGPSSTPTKMEPISILYL

SEQ ID NO: 274 - protein, 20 aa, Artificial Sequence
  Non-cyclic GFR-binding peptide
AAPASSSVPARLEPISILYL

SEQ ID NO: 275 - protein, 20 aa, Artificial Sequence
  Non-cyclic GFR-binding peptide
ASAAPSSVPQALEPISILYL

SEQ ID NO: 276 - protein, 20 aa, Artificial Sequence
  Non-cyclic GFR-binding peptide
ASASPSSVSQDLEPISILYL

SEQ ID NO: 277 - protein, 20 aa, Artificial Sequence
  Non-cyclic GFR-binding peptide
ASASPSSVPQDLEPISILYL

SEQ ID NO: 278 - protein, 20 aa, Artificial Sequence
  Non-cyclic GFR-binding peptide
SSVKSQPSRVHHEPISILYL

SEQ ID NO: 279 - protein, 20 aa, Artificial Sequence
  Non-cyclic GFR-binding peptide
RNVQSRPTQVQLEPISILYL

SEQ ID NO: 280 - protein, 20 aa, Artificial Sequence
  Non-cyclic GFR-binding peptide
HVTKPTSTPTKLSPINMLYF

SEQ ID NO: 281 - protein, 20 aa, Artificial Sequence
  Non-cyclic GFR-binding peptide
TVPKPSSTPTQLSPINMLYF

SEQ ID NO: 282 - protein, 20 aa, Artificial Sequence
  Non-cyclic GFR-binding peptide
AVPKASSTPTKLSPINMLYF

SEQ ID NO: 283 - protein, 20 aa, Artificial Sequence
  Non-cyclic GFR-binding peptide
KVGKASSTPTKLSPINMLYF

SEQ ID NO: 284 - protein, 20 aa, Artificial Sequence
  Non-cyclic GFR-binding peptide
KASKASSTPTKLSPINMLYF

SEQ ID NO: 285 - protein, 20 aa, Artificial Sequence
  Non-cyclic GFR-binding peptide
AAPASSSTPTRLSPINMLYF

SEQ ID NO: 286 - protein, 20 aa, Artificial Sequence
  Non-cyclic GFR-binding peptide
STPPTSSTPTRLSPINMLYF

SEQ ID NO: 287 - protein, 20 aa, Artificial Sequence
  Non-cyclic GFR-binding peptide
HVPKPSSTPTKLSPINMLYF

SEQ ID NO: 288 - protein, 20 aa, Artificial Sequence
  Non-cyclic GFR-binding peptide
RVPSTSSTPTKTSPINMLYF

SEQ ID NO: 289 - protein, 20 aa, Artificial Sequence
  Non-cyclic GFR-binding peptide
ASAAPSSTPTALSPINMLYF

SEQ ID NO: 290 - protein, 20 aa, Artificial Sequence
  Non-cyclic GFR-binding peptide
ASASPSSTPTDLSPINMLYF

SEQ ID NO: 291 - protein, 20 aa, Artificial Sequence
  Non-cyclic GFR-binding peptide
KIPKASSVPTELSPINMLYF

SEQ ID NO: 292 - protein, 20 aa, Artificial Sequence
  Non-cyclic GFR-binding peptide
GIPEPSSVPEKMSPINMLYF

SEQ ID NO: 293 - protein, 20 aa, Artificial Sequence
  Non-cyclic GFR-binding peptide
SIPKASSVPTELSPINMLYF

SEQ ID NO: 294 - protein, 20 aa, Artificial Sequence
  Non-cyclic GFR-binding peptide
HVTKPTSAPTKLSPINMLYF

SEQ ID NO: 295 - protein, 20 aa, Artificial Sequence
  Non-cyclic GFR-binding peptide
YVPKPSSAPTKLSPINMLYF

SEQ ID NO: 296 - protein, 20 aa, Artificial Sequence
  Non-cyclic GFR-binding peptide
TVPKPSSAPTQLSPINMLYF

SEQ ID NO: 297 - protein, 20 aa, Artificial Sequence
  Non-cyclic GFR-binding peptide
AVPKASSAPTKLSPINMLYF

SEQ ID NO: 298 - protein, 20 aa, Artificial Sequence
  Non-cyclic GFR-binding peptide
KVGKASSVPTKLSPINMLYF

SEQ ID NO: 299 - protein, 20 aa, Artificial Sequence
  Non-cyclic GFR-binding peptide
KASKASSVPTKLSPINMLYF

SEQ ID NO: 300 - protein, 20 aa, Artificial Sequence
  Non-cyclic GFR-binding peptide
AAPASSSVPARLSPINMLYF

SEQ ID NO: 301 - protein, 20 aa, Artificial Sequence
  Non-cyclic GFR-binding peptide
STPPTSSVPTRLSPINMLYF

SEQ ID NO: 302 - protein, 20 aa, Artificial Sequence
  Non-cyclic GFR-binding peptide
HVPKPSSAPTKLSPINMLYF

SEQ ID NO: 303 - protein, 20 aa, Artificial Sequence
  Non-cyclic GFR-binding peptide
RVPSTSSAPVKTSPINMLYF

SEQ ID NO: 304 - protein, 20 aa, Artificial Sequence
  Non-cyclic GFR-binding peptide
ASAAPSSVPQALSPINMLYF

SEQ ID NO: 305 - protein, 20 aa, Artificial Sequence
  Non-cyclic GFR-binding peptide
ASASPSSVSQDLSPINMLYF

SEQ ID NO: 306 - protein, 20 aa, Artificial Sequence
  Non-cyclic GFR-binding peptide
ASASPSSVPQDLSPINMLYF

SEQ ID NO: 307 - protein, 20 aa, Artificial Sequence
  Non-cyclic GFR-binding peptide
NDEGLESVPTEESPINMLYF

SEQ ID NO: 308 - protein, 20 aa, Artificial Sequence
  Non-cyclic GFR-binding peptide
NDEGLESVPTGQSPINMLYF

SEQ ID NO: 309 - protein, 20 aa, Artificial Sequence
  Non-cyclic GFR-binding peptide
SSVKSQPSRVHHSPINMLYF

SEQ ID NO: 310 - protein, 20 aa, Artificial Sequence
  Non-cyclic GFR-binding peptide
RNVQSRPTQVQLSPINMLYF

SEQ ID NO: 311 - protein, 20 aa, Artificial Sequence
  Non-cyclic GFR-binding peptide
KIPKASSVPAELSPISILYI

SEQ ID NO: 312 - protein, 20 aa, Artificial Sequence
  Non-cyclic GFR-binding peptide
SIPKASSVPAELSPISILYI

SEQ ID NO: 313 - protein, 20 aa, Artificial Sequence
  Non-cyclic GFR-binding peptide
HVTKPTSVPAKLSPISILYI

SEQ ID NO: 314 - protein, 20 aa, Artificial Sequence
  Non-cyclic GFR-binding peptide
YVPKPSSVPAKLSPISILYI

SEQ ID NO: 315 - protein, 20 aa, Artificial Sequence
  Non-cyclic GFR-binding peptide
TVPKPSSVPAQLSPISILYI

SEQ ID NO: 316 - protein, 20 aa, Artificial Sequence
  Non-cyclic GFR-binding peptide
AVPKASSVPAKLSPISILYI

SEQ ID NO: 317 - protein, 20 aa, Artificial Sequence
  Non-cyclic GFR-binding peptide
KVGKASSVPAKLSPISILYI

SEQ ID NO: 318 - protein, 20 aa, Artificial Sequence
  Non-cyclic GFR-binding peptide
KASKASSVPAKLSPISILYI

SEQ ID NO: 319 - protein, 20 aa, Artificial Sequence
  Non-cyclic GFR-binding peptide
GSAGPSSVPAKMSPISILYI

SEQ ID NO: 320 - protein, 20 aa, Artificial Sequence
  Non-cyclic GFR-binding peptide
STPPTSSVPARLSPISILYI

SEQ ID NO: 321 - protein, 20 aa, Artificial Sequence
  Non-cyclic GFR-binding peptide
HVPKPSSVPAKLSPISILYI

SEQ ID NO: 322 - protein, 20 aa, Artificial Sequence
  Non-cyclic GFR-binding peptide
ASASPSSVPADLSPISILYI

SEQ ID NO: 323 - protein, 20 aa, Artificial Sequence
  Non-cyclic GFR-binding peptide
KIPKASSVPTELSPISILYI

SEQ ID NO: 324 - protein, 20 aa, Artificial Sequence
  Non-cyclic GFR-binding peptide
SIPKASSVPTELSPISILYI

SEQ ID NO: 325 - protein, 20 aa, Artificial Sequence
  Non-cyclic GFR-binding peptide
HVTKPTSAPTKLSPISILYI

SEQ ID NO: 326 - protein, 20 aa, Artificial Sequence
  Non-cyclic GFR-binding peptide
YVPKPSSAPTKLSPISILYI

SEQ ID NO: 327 - protein, 20 aa, Artificial Sequence
  Non-cyclic GFR-binding peptide
AVPKASSAPTKLSPISILYI

SEQ ID NO: 328 - protein, 20 aa, Artificial Sequence
  Non-cyclic GFR-binding peptide
KVGKASSVPTKLSPISILYI

SEQ ID NO: 329 - protein, 20 aa, Artificial Sequence
  Non-cyclic GFR-binding peptide
KASKASSVPTKLSPISILYI

SEQ ID NO: 330 - protein, 20 aa, Artificial Sequence
  Non-cyclic GFR-binding peptide
GSAGPSSTPTKMSPISILYI

SEQ ID NO: 331 - protein, 20 aa, Artificial Sequence
  Non-cyclic GFR-binding peptide
STPPTSSVPTRLSPISILYI

SEQ ID NO: 332 - protein, 20 aa, Artificial Sequence
  Non-cyclic GFR-binding peptide
HVPKPSSAPTKLSPISILYI

SEQ ID NO: 333 - protein, 20 aa, Artificial Sequence
  Non-cyclic GFR-binding peptide
RVPSTSSAPVKTSPISILYI

SEQ ID NO: 334 - protein, 20 aa, Artificial Sequence
  Non-cyclic GFR-binding peptide
ASAAPSSVPQALSPISILYI

SEQ ID NO: 335 - protein, 20 aa, Artificial Sequence
  Non-cyclic GFR-binding peptide
ASASPSSVSQDLSPISILYI

SEQ ID NO: 336 - protein, 20 aa, Artificial Sequence
  Non-cyclic GFR-binding peptide
ASASPSSVPQDLSPISILYI

SEQ ID NO: 337 - protein, 20 aa, Artificial Sequence
  Non-cyclic GFR-binding peptide
NDEGLESVPTGQSPISILYI

SEQ ID NO: 338 - protein, 20 aa, Artificial Sequence
  Non-cyclic GFR-binding peptide
SSVKSQPSRVHHSPISILYI

SEQ ID NO: 339 - protein, 20 aa, Artificial Sequence
  Non-cyclic GFR-binding peptide
RNVQSRPTQVQLSPISILYI

SEQ ID NO: 340 - protein, 20 aa, Artificial Sequence
  Non-cyclic GFR-binding peptide
KIPKASSVPTELSPISILFI

SEQ ID NO: 341 - protein, 20 aa, Artificial Sequence
  Non-cyclic GFR-binding peptide
GIPEPSSVPTKMSPISILFI

SEQ ID NO: 342 - protein, 20 aa, Artificial Sequence
  Non-cyclic GFR-binding peptide
SIPKASSVPTELSPISILFI

SEQ ID NO: 343 - protein, 20 aa, Artificial Sequence
  Non-cyclic GFR-binding peptide
HVTKPTSVPTKLSPISILFI

SEQ ID NO: 344 - protein, 20 aa, Artificial Sequence
  Non-cyclic GFR-binding peptide
YVPKPSSVPTKLSPISILFI

SEQ ID NO: 345 - protein, 20 aa, Artificial Sequence
  Non-cyclic GFR-binding peptide
TVPKPSSVPTQLSPISILFI

SEQ ID NO: 346 - protein, 20 aa, Artificial Sequence
  Non-cyclic GFR-binding peptide
AVPKASSVPTKLSPISILFI

SEQ ID NO: 347 - protein, 20 aa, Artificial Sequence
  Non-cyclic GFR-binding peptide
KVGKASSVPTKLSPISILFI

SEQ ID NO: 348 - protein, 20 aa, Artificial Sequence
  Non-cyclic GFR-binding peptide
KASKASSVPTKLSPISILFI

SEQ ID NO: 349 - protein, 20 aa, Artificial Sequence
  Non-cyclic GFR-binding peptide
GSAGPSSVPTKMSPISILFI

SEQ ID NO: 350 - protein, 20 aa, Artificial Sequence
  Non-cyclic GFR-binding peptide
AAPASSSVPTRLSPISILFI

SEQ ID NO: 351 - protein, 20 aa, Artificial Sequence
  Non-cyclic GFR-binding peptide
HVPKPSSVPTKLSPISILFI

SEQ ID NO: 352 - protein, 20 aa, Artificial Sequence
  Non-cyclic GFR-binding peptide
RVPSTSSVPTKTSPISILFI

SEQ ID NO: 353 - protein, 20 aa, Artificial Sequence
  Non-cyclic GFR-binding peptide
ASAAPSSVPTALSPISILFI

SEQ ID NO: 354 - protein, 20 aa, Artificial Sequence
  Non-cyclic GFR-binding peptide
ASASPSSVPTDLSPISILFI

SEQ ID NO: 355 - protein, 20 aa, Artificial Sequence
  Non-cyclic GFR-binding peptide
GIPEPSSVPEKMSPISILFI

SEQ ID NO: 356 - protein, 20 aa, Artificial Sequence
  Non-cyclic GFR-binding peptide
HVTKPTSAPTKLSPISILFI

SEQ ID NO: 357 - protein, 20 aa, Artificial Sequence
  Non-cyclic GFR-binding peptide
YVPKPSSAPTKLSPISILFI

SEQ ID NO: 358 - protein, 20 aa, Artificial Sequence
  Non-cyclic GFR-binding peptide
TVPKPSSAPTQLSPISILFI

SEQ ID NO: 359 - protein, 20 aa, Artificial Sequence
  Non-cyclic GFR-binding peptide
AVPKASSAPTKLSPISILFI

SEQ ID NO: 360 - protein, 20 aa, Artificial Sequence
  Non-cyclic GFR-binding peptide
GSAGPSSTPTKMSPISILFI

SEQ ID NO: 361 - protein, 20 aa, Artificial Sequence
  Non-cyclic GFR-binding peptide
AAPASSSVPARLSPISILFI

SEQ ID NO: 362 - protein, 20 aa, Artificial Sequence
  Non-cyclic GFR-binding peptide
HVPKPSSAPTKLSPISILFI

SEQ ID NO: 363 - protein, 20 aa, Artificial Sequence
  Non-cyclic GFR-binding peptide
RVPSTSSAPVKTSPISILFI

SEQ ID NO: 364 - protein, 20 aa, Artificial Sequence
  Non-cyclic GFR-binding peptide
ASAAPSSVPQALSPISILFI

SEQ ID NO: 365 - protein, 20 aa, Artificial Sequence
  Non-cyclic GFR-binding peptide
ASASPSSVSQDLSPISILFI

SEQ ID NO: 366 - protein, 20 aa, Artificial Sequence
  Non-cyclic GFR-binding peptide
ASASPSSVPQDLSPISILFI

SEQ ID NO: 367 - protein, 20 aa, Artificial Sequence
  Non-cyclic GFR-binding peptide
KIPKASSAPVELKPLSMLYV

SEQ ID NO: 368 - protein, 20 aa, Artificial Sequence
  Non-cyclic GFR-binding peptide
GIPEPSSAPVKMKPLSMLYV

SEQ ID NO: 369 - protein, 20 aa, Artificial Sequence
  Non-cyclic GFR-binding peptide
SIPKASSAPVELKPLSMLYV

SEQ ID NO: 370 - protein, 20 aa, Artificial Sequence
  Non-cyclic GFR-binding peptide
HVTKPTSAPVKLKPLSMLYV

SEQ ID NO: 371 - protein, 20 aa, Artificial Sequence
  Non-cyclic GFR-binding peptide
YVPKPSSAPVKLKPLSMLYV

SEQ ID NO: 372 - protein, 20 aa, Artificial Sequence
  Non-cyclic GFR-binding peptide
TVPKPSSAPVQLKPLSMLYV

SEQ ID NO: 373 - protein, 20 aa, Artificial Sequence
  Non-cyclic GFR-binding peptide
AVPKASSAPVKLKPLSMLYV

SEQ ID NO: 374 - protein, 20 aa, Artificial Sequence
  Non-cyclic GFR-binding peptide
KVGKASSAPVKLKPLSMLYV

SEQ ID NO: 375 - protein, 20 aa, Artificial Sequence
  Non-cyclic GFR-binding peptide
KASKASSAPVKLKPLSMLYV

SEQ ID NO: 376 - protein, 20 aa, Artificial Sequence
  Non-cyclic GFR-binding peptide
GSAGPSSAPVKMKPLSMLYV

SEQ ID NO: 377 - protein, 20 aa, Artificial Sequence
  Non-cyclic GFR-binding peptide
AAPASSSAPVRLKPLSMLYV

SEQ ID NO: 378 - protein, 20 aa, Artificial Sequence
  Non-cyclic GFR-binding peptide
STPPTSSAPVRLKPLSMLYV

SEQ ID NO: 379 - protein, 20 aa, Artificial Sequence
  Non-cyclic GFR-binding peptide
HVPKPSSAPVKLKPLSMLYV

SEQ ID NO: 380 - protein, 20 aa, Artificial Sequence
  Non-cyclic GFR-binding peptide
ASAAPSSAPVALKPLSMLYV

SEQ ID NO: 381 - protein, 20 aa, Artificial Sequence
  Non-cyclic GFR-binding peptide
ASASPSSAPVDLKPLSMLYV

SEQ ID NO: 382 - protein, 20 aa, Artificial Sequence
  Non-cyclic GFR-binding peptide
KIPKASSVPTELKPLSMLYV

SEQ ID NO: 383 - protein, 20 aa, Artificial Sequence
  Non-cyclic GFR-binding peptide
GIPEPSSVPEKMKPLSMLYV

SEQ ID NO: 384 - protein, 20 aa, Artificial Sequence
  Non-cyclic GFR-binding peptide
SIPKASSVPTELKPLSMLYV

SEQ ID NO: 385 - protein, 20 aa, Artificial Sequence
  Non-cyclic GFR-binding peptide
HVTKPTSAPTKLKPLSMLYV

SEQ ID NO: 386 - protein, 20 aa, Artificial Sequence
  Non-cyclic GFR-binding peptide
YVPKPSSAPTKLKPLSMLYV

SEQ ID NO: 387 - protein, 20 aa, Artificial Sequence
  Non-cyclic GFR-binding peptide
TVPKPSSAPTQLKPLSMLYV

SEQ ID NO: 388 - protein, 20 aa, Artificial Sequence
  Non-cyclic GFR-binding peptide
AVPKASSAPTKLKPLSMLYV

SEQ ID NO: 389 - protein, 20 aa, Artificial Sequence
  Non-cyclic GFR-binding peptide
KVGKASSVPTKLKPLSMLYV

SEQ ID NO: 390 - protein, 20 aa, Artificial Sequence
  Non-cyclic GFR-binding peptide
KASKASSVPTKLKPLSMLYV

SEQ ID NO: 391 - protein, 20 aa, Artificial Sequence
  Non-cyclic GFR-binding peptide
GSAGPSSTPTKMKPLSMLYV

SEQ ID NO: 392 - protein, 20 aa, Artificial Sequence
  Non-cyclic GFR-binding peptide
AAPASSSVPARLKPLSMLYV

SEQ ID NO: 393 - protein, 20 aa, Artificial Sequence
  Non-cyclic GFR-binding peptide
STPPTSSVPTRLKPLSMLYV

SEQ ID NO: 394 - protein, 20 aa, Artificial Sequence
  Non-cyclic GFR-binding peptide
HVPKPSSAPTKLKPLSMLYV

SEQ ID NO: 395 - protein, 20 aa, Artificial Sequence
  Non-cyclic GFR-binding peptide
ASAAPSSVPQALKPLSMLYV

SEQ ID NO: 396 - protein, 20 aa, Artificial Sequence
  Non-cyclic GFR-binding peptide
ASASPSSVSQDLKPLSMLYV

SEQ ID NO: 397 - protein, 20 aa, Artificial Sequence
  Non-cyclic GFR-binding peptide
ASASPSSVPQDLKPLSMLYV

SEQ ID NO: 398 - protein, 20 aa, Artificial Sequence
  Non-cyclic GFR-binding peptide
NDEGLESVPTEEKPLSMLYV

SEQ ID NO: 399 - protein, 20 aa, Artificial Sequence
  Non-cyclic GFR-binding peptide
NDEGLESVPTGQKPLSMLYV

SEQ ID NO: 400 - protein, 20 aa, Artificial Sequence
  Non-cyclic GFR-binding peptide
HVTKPTSVPQKLEPLPIVYY

SEQ ID NO: 401 - protein, 20 aa, Artificial Sequence
  Non-cyclic GFR-binding peptide
YVPKPSSVPQKLEPLPIVYY

SEQ ID NO: 402 - protein, 20 aa, Artificial Sequence
  Non-cyclic GFR-binding peptide
TVPKPSSVPQQLEPLPIVYY

SEQ ID NO: 403 - protein, 20 aa, Artificial Sequence
  Non-cyclic GFR-binding peptide
AVPKASSVPQKLEPLPIVYY

SEQ ID NO: 404 - protein, 20 aa, Artificial Sequence
  Non-cyclic GFR-binding peptide
GSAGPSSVPQKMEPLPIVYY

SEQ ID NO: 405 - protein, 20 aa, Artificial Sequence
  Non-cyclic GFR-binding peptide
AAPASSSVPQRLEPLPIVYY

SEQ ID NO: 406 - protein, 20 aa, Artificial Sequence
  Non-cyclic GFR-binding peptide
STPPTSSVPQRLEPLPIVYY

SEQ ID NO: 407 - protein, 20 aa, Artificial Sequence
  Non-cyclic GFR-binding peptide
HVPKPSSVPQKLEPLPIVYY

SEQ ID NO: 408 - protein, 20 aa, Artificial Sequence
  Non-cyclic GFR-binding peptide
RVPSTSSVPQKTEPLPIVYY

SEQ ID NO: 409 - protein, 20 aa, Artificial Sequence
  Non-cyclic GFR-binding peptide
ASASPSSVPQDLEPLPIVYY

SEQ ID NO: 410 - protein, 20 aa, Artificial Sequence
  Non-cyclic GFR-binding peptide
GIPEPSSVPEKMEPLPIVYY

SEQ ID NO: 411 - protein, 20 aa, Artificial Sequence
  Non-cyclic GFR-binding peptide
SIPKASSVPTELEPLPIVYY

SEQ ID NO: 412 - protein, 20 aa, Artificial Sequence
  Non-cyclic GFR-binding peptide
HVTKPTSAPTKLEPLPIVYY

SEQ ID NO: 413 - protein, 20 aa, Artificial Sequence
  Non-cyclic GFR-binding peptide
YVPKPSSAPTKLEPLPIVYY

SEQ ID NO: 414 - protein, 20 aa, Artificial Sequence
  Non-cyclic GFR-binding peptide
TVPKPSSAPTQLEPLPIVYY

SEQ ID NO: 415 - protein, 20 aa, Artificial Sequence
  Non-cyclic GFR-binding peptide
KVGKASSVPTKLEPLPIVYY

SEQ ID NO: 416 - protein, 20 aa, Artificial Sequence
  Non-cyclic GFR-binding peptide
KASKASSVPTKLEPLPIVYY

SEQ ID NO: 417 - protein, 20 aa, Artificial Sequence
  Non-cyclic GFR-binding peptide
GSAGPSSTPTKMEPLPIVYY

SEQ ID NO: 418 - protein, 20 aa, Artificial Sequence
  Non-cyclic GFR-binding peptide
AAPASSSVPARLEPLPIVYY

SEQ ID NO: 419 - protein, 20 aa, Artificial Sequence
  Non-cyclic GFR-binding peptide
STPPTSSVPTRLEPLPIVYY

SEQ ID NO: 420 - protein, 20 aa, Artificial Sequence
  Non-cyclic GFR-binding peptide
HVPKPSSAPTKLEPLPIVYY

SEQ ID NO: 421 - protein, 20 aa, Artificial Sequence
  Non-cyclic GFR-binding peptide
RVPSTSSAPVKTEPLPIVYY

SEQ ID NO: 422 - protein, 20 aa, Artificial Sequence
  Non-cyclic GFR-binding peptide
ASASPSSVSQDLEPLPIVYY

SEQ ID NO: 423 - protein, 20 aa, Artificial Sequence
  Non-cyclic GFR-binding peptide
NDEGLESVPTEEEPLPIVYY

SEQ ID NO: 424 - protein, 20 aa, Artificial Sequence
  Non-cyclic GFR-binding peptide
NDEGLESVPTGQEPLPIVYY

SEQ ID NO: 425 - protein, 20 aa, Artificial Sequence
  Non-cyclic GFR-binding peptide
SSVKSQPSRVHHEPLPIVYY

SEQ ID NO: 426 - protein, 20 aa, Artificial Sequence
  Non-cyclic GFR-binding peptide
RNVQSRPTQVQLEPLPIVYY

SEQ ID NO: 427 - protein, 20 aa, Artificial Sequence
  Non-cyclic GFR-binding peptide
GIPEPSSVSQKMEPLTILYY

SEQ ID NO: 428 - protein, 20 aa, Artificial Sequence
  Non-cyclic GFR-binding peptide
SIPKASSVSQELEPLTILYY

SEQ ID NO: 429 - protein, 20 aa, Artificial Sequence
  Non-cyclic GFR-binding peptide
HVTKPTSVSQKLEPLTILYY

SEQ ID NO: 430 - protein, 20 aa, Artificial Sequence
  Non-cyclic GFR-binding peptide
YVPKPSSVSQKLEPLTILYY

SEQ ID NO: 431 - protein, 20 aa, Artificial Sequence
  Non-cyclic GFR-binding peptide
TVPKPSSVSQQLEPLTILYY

SEQ ID NO: 432 - protein, 20 aa, Artificial Sequence
  Non-cyclic GFR-binding peptide
AVPKASSVSQKLEPLTILYY

SEQ ID NO: 433 - protein, 20 aa, Artificial Sequence
  Non-cyclic GFR-binding peptide
KASKASSVSQKLEPLTILYY

SEQ ID NO: 434 - protein, 20 aa, Artificial Sequence
  Non-cyclic GFR-binding peptide
GSAGPSSVSQKMEPLTILYY

SEQ ID NO: 435 - protein, 20 aa, Artificial Sequence
  Non-cyclic GFR-binding peptide
AAPASSSVSQRLEPLTILYY

SEQ ID NO: 436 - protein, 20 aa, Artificial Sequence
  Non-cyclic GFR-binding peptide
STPPTSSVSQRLEPLTILYY

SEQ ID NO: 437 - protein, 20 aa, Artificial Sequence
  Non-cyclic GFR-binding peptide
HVPKPSSVSQKLEPLTILYY

SEQ ID NO: 438 - protein, 20 aa, Artificial Sequence
  Non-cyclic GFR-binding peptide
RVPSTSSVSQKTEPLTILYY

SEQ ID NO: 439 - protein, 20 aa, Artificial Sequence
  Non-cyclic GFR-binding peptide
ASAAPSSVSQALEPLTILYY

SEQ ID NO: 440 - protein, 20 aa, Artificial Sequence
  Non-cyclic GFR-binding peptide
KIPKASSVPTELEPLTILYY

SEQ ID NO: 441 - protein, 20 aa, Artificial Sequence
  Non-cyclic GFR-binding peptide
GIPEPSSVPEKMEPLTILYY

SEQ ID NO: 442 - protein, 20 aa, Artificial Sequence
  Non-cyclic GFR-binding peptide
SIPKASSVPTELEPLTILYY

SEQ ID NO: 443 - protein, 20 aa, Artificial Sequence
  Non-cyclic GFR-binding peptide
HVTKPTSAPTKLEPLTILYY

SEQ ID NO: 444 - protein, 20 aa, Artificial Sequence
  Non-cyclic GFR-binding peptide
YVPKPSSAPTKLEPLTILYY

SEQ ID NO: 445 - protein, 20 aa, Artificial Sequence
  Non-cyclic GFR-binding peptide
TVPKPSSAPTQLEPLTILYY

SEQ ID NO: 446 - protein, 20 aa, Artificial Sequence
  Non-cyclic GFR-binding peptide
AVPKASSAPTKLEPLTILYY

SEQ ID NO: 447 - protein, 20 aa, Artificial Sequence
  Non-cyclic GFR-binding peptide
KASKASSVPTKLEPLTILYY

SEQ ID NO: 448 - protein, 20 aa, Artificial Sequence
  Non-cyclic GFR-binding peptide
GSAGPSSTPTKMEPLTILYY

SEQ ID NO: 449 - protein, 20 aa, Artificial Sequence
  Non-cyclic GFR-binding peptide
AAPASSSVPARLEPLTILYY

SEQ ID NO: 450 - protein, 20 aa, Artificial Sequence
  Non-cyclic GFR-binding peptide
STPPTSSVPTRLEPLTILYY

SEQ ID NO: 451 - protein, 20 aa, Artificial Sequence
  Non-cyclic GFR-binding peptide
HVPKPSSAPTKLEPLTILYY

SEQ ID NO: 452 - protein, 20 aa, Artificial Sequence
  Non-cyclic GFR-binding peptide
RVPSTSSAPVKTEPLTILYY

SEQ ID NO: 453 - protein, 20 aa, Artificial Sequence
  Non-cyclic GFR-binding peptide
NDEGLESVPTGQEPLTILYY

SEQ ID NO: 454 - protein, 20 aa, Artificial Sequence
  Non-cyclic GFR-binding peptide
SSVKSQPSRVHHEPLTILYY

SEQ ID NO: 455 - protein, 20 aa, Artificial Sequence
  Non-cyclic GFR-binding peptide
RNVQSRPTQVQLEPLTILYY

SEQ ID NO: 456 - protein, 20 aa, Artificial Sequence
  Non-cyclic GFR-binding peptide
KIPKASSVPQELEPLTILYY

SEQ ID NO: 457 - protein, 20 aa, Artificial Sequence
  Non-cyclic GFR-binding peptide
GIPEPSSVPQKMEPLTILYY

SEQ ID NO: 458 - protein, 20 aa, Artificial Sequence
  Non-cyclic GFR-binding peptide
SIPKASSVPQELEPLTILYY

SEQ ID NO: 459 - protein, 20 aa, Artificial Sequence
  Non-cyclic GFR-binding peptide
HVTKPTSVPQKLEPLTILYY

SEQ ID NO: 460 - protein, 20 aa, Artificial Sequence
  Non-cyclic GFR-binding peptide
YVPKPSSVPQKLEPLTILYY

SEQ ID NO: 461 - protein, 20 aa, Artificial Sequence
  Non-cyclic GFR-binding peptide
TVPKPSSVPQQLEPLTILYY

SEQ ID NO: 462 - protein, 20 aa, Artificial Sequence
  Non-cyclic GFR-binding peptide
AVPKASSVPQKLEPLTILYY

SEQ ID NO: 463 - protein, 20 aa, Artificial Sequence
  Non-cyclic GFR-binding peptide
KVGKASSVPQKLEPLTILYY

SEQ ID NO: 464 - protein, 20 aa, Artificial Sequence
  Non-cyclic GFR-binding peptide
KASKASSVPQKLEPLTILYY

SEQ ID NO: 465 - protein, 20 aa, Artificial Sequence
  Non-cyclic GFR-binding peptide
GSAGPSSVPQKMEPLTILYY

SEQ ID NO: 466 - protein, 20 aa, Artificial Sequence
  Non-cyclic GFR-binding peptide
AAPASSSVPQRLEPLTILYY

SEQ ID NO: 467 - protein, 20 aa, Artificial Sequence
  Non-cyclic GFR-binding peptide
STPPTSSVPQRLEPLTILYY

SEQ ID NO: 468 - protein, 20 aa, Artificial Sequence
  Non-cyclic GFR-binding peptide
HVPKPSSVPQKLEPLTILYY

SEQ ID NO: 469 - protein, 20 aa, Artificial Sequence
  Non-cyclic GFR-binding peptide
RVPSTSSVPQKTEPLTILYY

SEQ ID NO: 470 - protein, 20 aa, Artificial Sequence
  Non-cyclic GFR-binding peptide
NDEGLESVPTGQSNITMQIM

SEQ ID NO: 471 - protein, 20 aa, Artificial Sequence
  Non-cyclic GFR-binding peptide
GIPEPSSVPEKMSNITMQIM

SEQ ID NO: 472 - protein, 20 aa, Artificial Sequence
  Non-cyclic GFR-binding peptide
HVTKPTSAPTKLSNITMQIM

SEQ ID NO: 473 - protein, 20 aa, Artificial Sequence
  Non-cyclic GFR-binding peptide
YVPKPSSAPTKLSNITMQIM

SEQ ID NO: 474 - protein, 20 aa, Artificial Sequence
  Non-cyclic GFR-binding peptide
TVPKPSSAPTQLSNITMQIM

SEQ ID NO: 475 - protein, 20 aa, Artificial Sequence
  Non-cyclic GFR-binding peptide
AVPKASSAPTKLSNITMQIM

SEQ ID NO: 476 - protein, 20 aa, Artificial Sequence
  Non-cyclic GFR-binding peptide
HVPKPSSAPTKLSNITMQIM

SEQ ID NO: 477 - protein, 20 aa, Artificial Sequence
  Non-cyclic GFR-binding peptide
RVPSTSSAPVKTSNITMQIM

SEQ ID NO: 478 - protein, 20 aa, Artificial Sequence
  Non-cyclic GFR-binding peptide
ASAAPSSVPQALSNITMQIM

SEQ ID NO: 479 - protein, 20 aa, Artificial Sequence
  Non-cyclic GFR-binding peptide
ASASPSSVSQDLSNITMQIM

SEQ ID NO: 480 - protein, 20 aa, Artificial Sequence
  Non-cyclic GFR-binding peptide
ASASPSSVPQDLSNITMQIM

SEQ ID NO: 481 - protein, 20 aa, Artificial Sequence
  Non-cyclic GFR-binding peptide
SSVKSQPSRVHHSNITMQIM

SEQ ID NO: 482 - protein, 20 aa, Artificial Sequence
  Non-cyclic GFR-binding peptide
RNVQSRPTQVQLSNITMQIM

SEQ ID NO: 483 - protein, 20 aa, Artificial Sequence
  Non-cyclic GFR-binding peptide
RNVQSRPSRVQLRSVKVAKV

SEQ ID NO: 484 - protein, 20 aa, Artificial Sequence
  Non-cyclic GFR-binding peptide
KIPKASSVPTELRSVKVAKV

SEQ ID NO: 485 - protein, 20 aa, Artificial Sequence
  Non-cyclic GFR-binding peptide
GIPEPSSVPEKMRSVKVAKV

SEQ ID NO: 486 - protein, 20 aa, Artificial Sequence
  Non-cyclic GFR-binding peptide
YVPKPSSAPTKLRSVKVAKV

SEQ ID NO: 487 - protein, 20 aa, Artificial Sequence
  Non-cyclic GFR-binding peptide
AVPKASSAPTKLRSVKVAKV

SEQ ID NO: 488 - protein, 20 aa, Artificial Sequence
  Non-cyclic GFR-binding peptide
KVGKASSVPTKLRSVKVAKV

SEQ ID NO: 489 - protein, 20 aa, Artificial Sequence
  Non-cyclic GFR-binding peptide
KASKASSVPTKLRSVKVAKV

SEQ ID NO: 490 - protein, 20 aa, Artificial Sequence
  Non-cyclic GFR-binding peptide
GSAGPSSTPTKMRSVKVAKV

SEQ ID NO: 491 - protein, 20 aa, Artificial Sequence
  Non-cyclic GFR-binding peptide
AAPASSSVPARLRSVKVAKV

SEQ ID NO: 492 - protein, 20 aa, Artificial Sequence
  Non-cyclic GFR-binding peptide
STPPTSSVPTRLRSVKVAKV

SEQ ID NO: 493 - protein, 20 aa, Artificial Sequence
  Non-cyclic GFR-binding peptide
HVPKPSSAPTKLRSVKVAKV

SEQ ID NO: 494 - protein, 20 aa, Artificial Sequence
  Non-cyclic GFR-binding peptide
RVPSTSSAPVKTRSVKVAKV

SEQ ID NO: 495 - protein, 20 aa, Artificial Sequence
  Non-cyclic GFR-binding peptide
ASASPSSVSQDLRSVKVAKV

SEQ ID NO: 496 - protein, 20 aa, Artificial Sequence
  Non-cyclic GFR-binding peptide
NDEGLESVPTGQRSVKVAKV

SEQ ID NO: 497 - protein, 20 aa, Artificial Sequence
  Non-cyclic GFR-binding peptide
RNVQSRPTQVQLRSVKVAKV

SEQ ID NO: 498 - protein, 20 aa, Artificial Sequence
  Non-cyclic GFR-binding peptide
SSVKSQPTQVHHRPVQVRKI

SEQ ID NO: 499 - protein, 20 aa, Artificial Sequence
  Non-cyclic GFR-binding peptide
KIPKASSVPTELRPVQVRKI

SEQ ID NO: 500 - protein, 20 aa, Artificial Sequence
  Non-cyclic GFR-binding peptide
GIPEPSSVPEKMRPVQVRKI

SEQ ID NO: 501 - protein, 20 aa, Artificial Sequence
  Non-cyclic GFR-binding peptide
SIPKASSVPTELRPVQVRKI

SEQ ID NO: 502 - protein, 20 aa, Artificial Sequence
  Non-cyclic GFR-binding peptide
HVTKPTSAPTKLRPVQVRKI

SEQ ID NO: 503 - protein, 20 aa, Artificial Sequence
  Non-cyclic GFR-binding peptide
YVPKPSSAPTKLRPVQVRKI

SEQ ID NO: 504 - protein, 20 aa, Artificial Sequence
  Non-cyclic GFR-binding peptide
TVPKPSSAPTQLRPVQVRKI

SEQ ID NO: 505 - protein, 20 aa, Artificial Sequence
  Non-cyclic GFR-binding peptide
AVPKASSAPTKLRPVQVRKI

SEQ ID NO: 506 - protein, 20 aa, Artificial Sequence
  Non-cyclic GFR-binding peptide
KVGKASSVPTKLRPVQVRKI

SEQ ID NO: 507 - protein, 20 aa, Artificial Sequence
  Non-cyclic GFR-binding peptide
KASKASSVPTKLRPVQVRKI

SEQ ID NO: 508 - protein, 20 aa, Artificial Sequence
  Non-cyclic GFR-binding peptide
GSAGPSSTPTKMRPVQVRKI

SEQ ID NO: 509 - protein, 20 aa, Artificial Sequence
  Non-cyclic GFR-binding peptide
AAPASSSVPARLRPVQVRKI

SEQ ID NO: 510 - protein, 20 aa, Artificial Sequence
  Non-cyclic GFR-binding peptide
STPPTSSVPTRLRPVQVRKI

SEQ ID NO: 511 - protein, 20 aa, Artificial Sequence
  Non-cyclic GFR-binding peptide
HVPKPSSAPTKLRPVQVRKI

SEQ ID NO: 512 - protein, 20 aa, Artificial Sequence
  Non-cyclic GFR-binding peptide
RVPSTSSAPVKTRPVQVRKI

SEQ ID NO: 513 - protein, 20 aa, Artificial Sequence
  Non-cyclic GFR-binding peptide
ASASPSSVSQDLRPVQVRKI

SEQ ID NO: 514 - protein, 20 aa, Artificial Sequence
  Non-cyclic GFR-binding peptide
NDEGLESVPTGQRPVQVRKI

SEQ ID NO: 515 - protein, 20 aa, Artificial Sequence
  Non-cyclic GFR-binding peptide
SSVKSQPSRVHHRPVQVRKI

SEQ ID NO: 516 - protein, 8 aa, Artificial Sequence
  Non-cyclic GFR-binding peptide
SAISILYL

SEQ ID NO: 517 - protein, 8 aa, Artificial Sequence
  Non-cyclic GFR-binding peptide
SAISVLYL

SEQ ID NO: 518 - protein, 8 aa, Artificial Sequence
  Non-cyclic GFR-binding peptide
SSLSMLFF

SEQ ID NO: 519 - protein, 8 aa, Artificial Sequence
  Non-cyclic GFR-binding peptide
SSLSVLFF

SEQ ID NO: 520 - protein, 8 aa, Artificial Sequence
  Non-cyclic GFR-binding peptide
NAISMLYF

SEQ ID NO: 521 - protein, 8 aa, Artificial Sequence
  Non-cyclic GFR-binding peptide
NAISILYF

SEQ ID NO: 522 - protein, 8 aa, Artificial Sequence
  Non-cyclic GFR-binding peptide
SATSMLYY

SEQ ID NO: 523 - protein, 8 aa, Artificial Sequence
  Non-cyclic GFR-binding peptide
SATSILYY

SEQ ID NO: 524 - protein, 8 aa, Artificial Sequence
  Non-cyclic GFR-binding peptide
SPISMLYK

SEQ ID NO: 525 - protein, 8 aa, Artificial Sequence
  Non-cyclic GFR-binding peptide
SPISILYK

SEQ ID NO: 526 - protein, 8 aa, Artificial Sequence
  Non-cyclic GFR-binding peptide
EPISMLYL

SEQ ID NO: 527 - protein, 8 aa, Artificial Sequence
  Non-cyclic GFR-binding peptide
EPISVLYL

SEQ ID NO: 528 - protein, 8 aa, Artificial Sequence
  Non-cyclic GFR-binding peptide
SPINILYF

SEQ ID NO: 529 - protein, 8 aa, Artificial Sequence
  Non-cyclic GFR-binding peptide
SPINVLYF

SEQ ID NO: 530 - protein, 8 aa, Artificial Sequence
  Non-cyclic GFR-binding peptide
SPISMLYI

SEQ ID NO: 531 - protein, 8 aa, Artificial Sequence
  Non-cyclic GFR-binding peptide
SPISVLYI

SEQ ID NO: 532 - protein, 8 aa, Artificial Sequence
  Non-cyclic GFR-binding peptide
SPISMLFI

SEQ ID NO: 533 - protein, 8 aa, Artificial Sequence
  Non-cyclic GFR-binding peptide
SPISVLFI

SEQ ID NO: 534 - protein, 8 aa, Artificial Sequence
  Non-cyclic GFR-binding peptide
KPLSILYV

SEQ ID NO: 535 - protein, 8 aa, Artificial Sequence
  Non-cyclic GFR-binding peptide
KPLSVLYV

SEQ ID NO: 536 - protein, 8 aa, Artificial Sequence
  Non-cyclic GFR-binding peptide
EPLPMVYY

SEQ ID NO: 537 - protein, 8 aa, Artificial Sequence
  Non-cyclic GFR-binding peptide
EPLPVVYY

SEQ ID NO: 538 - protein, 8 aa, Artificial Sequence
  Non-cyclic GFR-binding peptide
EPLTMLYY

SEQ ID NO: 539 - protein, 8 aa, Artificial Sequence
  Non-cyclic GFR-binding peptide
EPLTVLYY

SEQ ID NO: 540 - protein, 8 aa, Artificial Sequence
  Non-cyclic GFR-binding peptide
SNITIQIM

SEQ ID NO: 541 - protein, 8 aa, Artificial Sequence
  Non-cyclic GFR-binding peptide
SNITVQIM

SEQ ID NO: 542 - protein, 8 aa, Artificial Sequence
  Non-cyclic GFR-binding peptide
RSVKMAKV

SEQ ID NO: 543 - protein, 8 aa, Artificial Sequence
  Non-cyclic GFR-binding peptide
RSVKIAKV

SEQ ID NO: 544 - protein, 8 aa, Artificial Sequence
  Non-cyclic GFR-binding peptide
RPVQMRKI

SEQ ID NO: 545 - protein, 8 aa, Artificial Sequence
  Non-cyclic GFR-binding peptide
RPVQIRKI

SEQ ID NO: 546 - protein, 20 aa, Artificial Sequence
  Non-cyclic GFR-binding peptide
LYLMSIASLRTPVSSSAPAA

SEQ ID NO: 547 - protein, 20 aa, Artificial Sequence
  Non-cyclic GFR-binding peptide
LYLMSIASLRTPVSSTPPTS

SEQ ID NO: 548 - protein, 20 aa, Artificial Sequence
  Non-cyclic GFR-binding peptide
FYLVSIANEETPASELGEDN

SEQ ID NO: 549 - protein, 20 aa, Artificial Sequence
  Non-cyclic GFR-binding peptide
FYLVSIANQGTPASELGEDN

SEQ ID NO: 550 - protein, 20 aa, Artificial Sequence
  Non-cyclic GFR-binding peptide
FFLISLSSLKEPVSTPKTVH

SEQ ID NO: 551 - protein, 20 aa, Artificial Sequence
  Non-cyclic GFR-binding peptide
YYLITLPELKQSVSSAKGVK

SEQ ID NO: 552 - protein, 20 aa, Artificial Sequence
  Non-cyclic GFR-binding peptide
FYLVSIANLQVQTPRSQVNR

SEQ ID NO: 553 - protein, 20 aa, Artificial Sequence
  Non-cyclic GFR-binding peptide
LYLMSIASLKTPASSPKPVH

SEQ ID NO: 554 - protein, 20 aa, Artificial Sequence
  Non-cyclic GFR-binding peptide
YYLITLPELKTPVSSAKGVK

SEQ ID NO: 555 - protein, 20 aa, Artificial Sequence
  Non-cyclic GFR-binding peptide
LYLMSIASLQVQTPRSQVNR

SEQ ID NO: 556 - protein, 20 aa, Artificial Sequence
  Non-cyclic GFR-binding peptide
LYLMSIASLDQSVSSPSASA

SEQ ID NO: 557 - protein, 20 aa, Artificial Sequence
  Non-cyclic GFR-binding peptide
KYLVSIPSLKTPVSSPKPVH

SEQ ID NO: 558 - protein, 20 aa, Artificial Sequence
  Non-cyclic GFR-binding peptide
FYLVSIANQGTPVSELGEDN

SEQ ID NO: 559 - protein, 20 aa, Artificial Sequence
  Non-cyclic GFR-binding peptide
LYLMSIASLQTPASSPKPVT

SEQ ID NO: 560 - protein, 20 aa, Artificial Sequence
  Non-cyclic GFR-binding peptide
LYLMSIASLKTPASSAKPVA

SEQ ID NO: 561 - protein, 20 aa, Artificial Sequence
  Non-cyclic GFR-binding peptide
LYLMSIASLKTPVSSAKGVK

SEQ ID NO: 562 - protein, 20 aa, Artificial Sequence
  Non-cyclic GFR-binding peptide
LYLMSIASLKTPVSSAKGGG

SEQ ID NO: 563 - protein, 24 aa, Artificial Sequence
  Non-cyclic GFR-binding peptide
LYLMSIASMKTPTSSPGASGWFWW

SEQ ID NO: 564 - protein, 25 aa, Artificial Sequence
  Non-cyclic GFR-binding peptide
LYLMSIASLKTPVSTPKTVHPGPTG

SEQ ID NO: 565 - protein, 18 aa, Artificial Sequence
  Non-cyclic GFR-binding peptide
YYLITLPELEQPVPGPTG

SEQ ID NO: 566 - protein, 18 aa, Artificial Sequence
  Non-cyclic GFR-binding peptide
KYLVSIPSLETPVPGPTG

SEQ ID NO: 567 - protein, 21 aa, Artificial Sequence
  Non-cyclic GFR-binding peptide
LYLMSIASLKTPVSSAPGPTG

SEQ ID NO: 568 - protein, 18 aa, Artificial Sequence
  Non-cyclic GFR-binding peptide
LYLMSIASQGTPVPGPTG

SEQ ID NO: 569 - protein, 18 aa, Artificial Sequence
  Non-cyclic GFR-binding peptide
LYLMSIASEETPVPGPTG

SEQ ID NO: 570 - protein, 21 aa, Artificial Sequence
  Non-cyclic GFR-binding peptide
KYLVSIPSLKTPVSTPPGPTG

SEQ ID NO: 571 - protein, 21 aa, Artificial Sequence
  Non-cyclic GFR-binding peptide
KYLVSIPSLKTPVSSPPGPTG

SEQ ID NO: 572 - protein, 25 aa, Artificial Sequence
  Non-cyclic GFR-binding peptide
FYLVSIANQGTPASELGEDNPGPTG

SEQ ID NO: 573 - protein, 25 aa, Artificial Sequence
  Non-cyclic GFR-binding peptide
KYLVSIPSLRTPVSSSAPAAGWFWW

SEQ ID NO: 574 - protein, 25 aa, Artificial Sequence
  Non-cyclic GFR-binding peptide
LYLMSIASLKTPVSSAKSAKGWFWW

SEQ ID NO: 575 - protein, 25 aa, Artificial Sequence
  Non-cyclic GFR-binding peptide
LYLMSIASMKTPTSSPGASGPGPTG

SEQ ID NO: 576 - protein, 25 aa, Artificial Sequence
  Non-cyclic GFR-binding peptide
LYLMSIASLRAPVSSSAPAAPGPTG

SEQ ID NO: 577 - protein, 20 aa, Artificial Sequence
  Non-cyclic GFR-binding peptide
VKAVKVSRLRVRSSSTPPTS

SEQ ID NO: 578 - protein, 20 aa, Artificial Sequence
  Non-cyclic GFR-binding peptide
MIQMTINSLKTPVSSAKGVK

SEQ ID NO: 579 - protein, 20 aa, Artificial Sequence
  Non-cyclic GFR-binding peptide
IKRVQVPRLDVQTSSPSASA

SEQ ID NO: 580 - protein, 20 aa, Artificial Sequence
  Non-cyclic GFR-binding peptide
FFLISLSSLKEPVSSAKSAA

SEQ ID NO: 581 - protein, 20 aa, Artificial Sequence
  Non-cyclic GFR-binding peptide
FFLISLSSMKEPVSSPGASG

SEQ ID NO: 582 - protein, 20 aa, Artificial Sequence
  Non-cyclic GFR-binding peptide
IYLISIPSTKAPVSSTSPVR

SEQ ID NO: 583 - protein, 20 aa, Artificial Sequence
  Non-cyclic GFR-binding peptide
IYLISIPSLAAPVSSPAASA

SEQ ID NO: 584 - protein, 20 aa, Artificial Sequence
  Non-cyclic GFR-binding peptide
IYLISIPSEEAPVSELGEDN

SEQ ID NO: 585 - protein, 13 aa, Artificial Sequence
  Non-cyclic GFR-binding peptide
IYLISIPSQGAPV

SEQ ID NO: 586 - protein, 13 aa, Artificial Sequence
  Non-cyclic GFR-binding peptide
IYLISIPSEEAPV

SEQ ID NO: 587 - protein, 20 aa, Artificial Sequence
  Non-cyclic GFR-binding peptide
IYLISIPSMKAPVSSPEPIG

SEQ ID NO: 588 - protein, 20 aa, Artificial Sequence
  Non-cyclic GFR-binding peptide
IKRVQVPRLAQPVSSPAASA

SEQ ID NO: 589 - protein, 18 aa, Artificial Sequence
  Non-cyclic GFR-binding peptide
IKRVQVPRLDQSVSSPSA

SEQ ID NO: 590 - protein, 20 aa, Artificial Sequence
  Non-cyclic GFR-binding peptide
IKRVQVPRLDQPVSSPSASA

SEQ ID NO: 591 - protein, 20 aa, Artificial Sequence
  Non-cyclic GFR-binding peptide
IKRVQVPREETPVSELGEDN

SEQ ID NO: 592 - protein, 8 aa, Artificial Sequence
  Non-cyclic GFR-binding peptide
IKRVQVPR

SEQ ID NO: 593 - protein, 20 aa, Artificial Sequence
  Non-cyclic GFR-binding peptide
MIQMTINSLQTPVSSPKPVT

SEQ ID NO: 594 - protein, 20 aa, Artificial Sequence
  Non-cyclic GFR-binding peptide
MIQMTINSLKTPVSSAKPVA

SEQ ID NO: 595 - protein, 20 aa, Artificial Sequence
  Non-cyclic GFR-binding peptide
FYLMNIPSLKTPTSSPKPVY

SEQ ID NO: 596 - protein, 20 aa, Artificial Sequence
  Non-cyclic GFR-binding peptide
FFLISLSSLAQPVSSPAASA

SEQ ID NO: 597 - protein, 20 aa, Artificial Sequence
  Non-cyclic GFR-binding peptide
LYLISIPELKTPASSAKPVA

SEQ ID NO: 598 - protein, 20 aa, Artificial Sequence
  Non-cyclic GFR-binding peptide
VYLMSLPKLQVQTPRSQVNR

SEQ ID NO: 599 - protein, 20 aa, Artificial Sequence
  Non-cyclic GFR-binding peptide
YYVIPLPELEQPVSSAKPIK

SEQ ID NO: 600 - protein, 20 aa, Artificial Sequence
  Non-cyclic GFR-binding peptide
YYVIPLPEMKQPVSSPEPIG

SEQ ID NO: 601 - protein, 20 aa, Artificial Sequence
  Non-cyclic GFR-binding peptide
YYLITLPELAQPVSSPAASA

SEQ ID NO: 602 - protein, 20 aa, Artificial Sequence
  Non-cyclic GFR-binding peptide
YYLITLPELDQSVSSPSASA

SEQ ID NO: 603 - protein, 20 aa, Artificial Sequence
  Non-cyclic GFR-binding peptide
YYLITLPEEETPVSELGEDN

SEQ ID NO: 604 - protein, 20 aa, Artificial Sequence
  Non-cyclic GFR-binding peptide
FFLISLSSEETPVSELGEDN

SEQ ID NO: 605 - protein, 20 aa, Artificial Sequence
  Non-cyclic GFR-binding peptide
MIQMTINSLKTPVSSAKSAK

SEQ ID NO: 606 - protein, 20 aa, Artificial Sequence
  Non-cyclic GFR-binding peptide
YYLVSTASTKTPASSTSPVR

SEQ ID NO: 607 - protein, 20 aa, Artificial Sequence
  Non-cyclic GFR-binding peptide
YYLVSTASLATPASSPAASA

SEQ ID NO: 608 - protein, 20 aa, Artificial Sequence
  Non-cyclic GFR-binding peptide
YYLVSTASLDTPASSPSASA

SEQ ID NO: 609 - protein, 20 aa, Artificial Sequence
  Non-cyclic GFR-binding peptide
VKAVKVSRLETPVSSAKPIS

SEQ ID NO: 610 - protein, 20 aa, Artificial Sequence
  Non-cyclic GFR-binding peptide
VKAVKVSRLKTPASTPKTVH

SEQ ID NO: 611 - protein, 20 aa, Artificial Sequence
  Non-cyclic GFR-binding peptide
VKAVKVSRLQTPASSPKPVT

SEQ ID NO: 612 - protein, 20 aa, Artificial Sequence
  Non-cyclic GFR-binding peptide
YYVIPLPELKQPVSSAKSAK

SEQ ID NO: 613 - protein, 20 aa, Artificial Sequence
  Non-cyclic GFR-binding peptide
KYLVSIPSLQTPVPRSQVNR

SEQ ID NO: 614 - protein, 20 aa, Artificial Sequence
  Non-cyclic GFR-binding peptide
KYLVSIPSLETPVSSAKPIK

SEQ ID NO: 615 - protein, 13 aa, Artificial Sequence
  Non-cyclic GFR-binding peptide
IKRVQVPRMKVQT

SEQ ID NO: 616 - protein, 20 aa, Artificial Sequence
  Non-cyclic GFR-binding peptide
IKRVQVPRLEVQTSSAKPIS

SEQ ID NO: 617 - protein, 20 aa, Artificial Sequence
  Non-cyclic GFR-binding peptide
FYLMNIPSMKTPTSSPEPIG

SEQ ID NO: 618 - protein, 13 aa, Artificial Sequence
  Non-cyclic GFR-binding peptide
LYLMSIASQGTPV

SEQ ID NO: 619 - protein, 20 aa, Artificial Sequence
  Non-cyclic GFR-binding peptide
IYLISIPSEETPVSELGEDN

SEQ ID NO: 620 - protein, 20 aa, Artificial Sequence
  Non-cyclic GFR-binding peptide
IYLISIPSHHVRSPQSKVVV

SEQ ID NO: 621 - protein, 20 aa, Artificial Sequence
  Non-cyclic GFR-binding peptide
IFLISIPSLQVQTPRSQVNR

SEQ ID NO: 622 - protein, 20 aa, Artificial Sequence
  Non-cyclic GFR-binding peptide
FYLVSIANLKTPASSPKPVY

SEQ ID NO: 623 - protein, 20 aa, Artificial Sequence
  Non-cyclic GFR-binding peptide
LYLMSIASTKTPVSSTSPVR

SEQ ID NO: 624 - protein, 20 aa, Artificial Sequence
  Non-cyclic GFR-binding peptide
LYLISIPELKTPASSPKPVH

SEQ ID NO: 625 - protein, 20 aa, Artificial Sequence
  Non-cyclic GFR-binding peptide
LYLISIPETKVPASSTSPVR

SEQ ID NO: 626 - protein, 20 aa, Artificial Sequence
  Non-cyclic GFR-binding peptide
LYLMSIASMKTPVSSPEPIG

SEQ ID NO: 627 - protein, 20 aa, Artificial Sequence
  Non-cyclic GFR-binding peptide
LYLMSIASLKTPVSTPKTVH

SEQ ID NO: 628 - protein, 20 aa, Artificial Sequence
  Non-cyclic GFR-binding peptide
LYLMSIASLKTPVSSPKPVY

SEQ ID NO: 629 - protein, 20 aa, Artificial Sequence
  Non-cyclic GFR-binding peptide
LYLMSIASLQTPVSSPKPVT

SEQ ID NO: 630 - protein, 20 aa, Artificial Sequence
  Non-cyclic GFR-binding peptide
LYLMSIASLKTPVSSAKPVA

SEQ ID NO: 631 - protein, 20 aa, Artificial Sequence
  Non-cyclic GFR-binding peptide
LYLMSIASLKTPVSSAKSAK

SEQ ID NO: 632 - protein, 20 aa, Artificial Sequence
  Non-cyclic GFR-binding peptide
LYLMSIASLKTPVSSPKPVH

SEQ ID NO: 633 - protein, 20 aa, Artificial Sequence
  Non-cyclic GFR-binding peptide
LYLMSIASLATPVSSPAASA

SEQ ID NO: 634 - protein, 20 aa, Artificial Sequence
  Non-cyclic GFR-binding peptide
LYLMSIASLDTPVSSPSASA

SEQ ID NO: 635 - protein, 20 aa, Artificial Sequence
  Non-cyclic GFR-binding peptide
LYLMSIASMKEPVSSPEPIG

SEQ ID NO: 636 - protein, 20 aa, Artificial Sequence
  Non-cyclic GFR-binding peptide
LYLMSIASLKTPASTPKTVH

SEQ ID NO: 637 - protein, 20 aa, Artificial Sequence
  Non-cyclic GFR-binding peptide
LYLMSIASLKTPASSPKPVY

SEQ ID NO: 638 - protein, 20 aa, Artificial Sequence
  Non-cyclic GFR-binding peptide
LYLMSIASMKTPTSSPGASG

SEQ ID NO: 639 - protein, 20 aa, Artificial Sequence
  Non-cyclic GFR-binding peptide
LYLMSIASLRAPVSSSAPAA

SEQ ID NO: 640 - protein, 20 aa, Artificial Sequence
  Non-cyclic GFR-binding peptide
LYLMSIASTKVPASSTSPVR

SEQ ID NO: 641 - protein, 20 aa, Artificial Sequence
  Non-cyclic GFR-binding peptide
LYLMSIASLAQPVSSPAASA

SEQ ID NO: 642 - protein, 20 aa, Artificial Sequence
  Non-cyclic GFR-binding peptide
LYLMSIASLDQPVSSPSASA

SEQ ID NO: 643 - protein, 20 aa, Artificial Sequence
  Non-cyclic GFR-binding peptide
LYLMSIASHHVRSPQSKVSS

SEQ ID NO: 644 - protein, 20 aa, Artificial Sequence
  Non-cyclic GFR-binding peptide
FFLISLSSLEEPVSSAKPIK

SEQ ID NO: 645 - protein, 20 aa, Artificial Sequence
  Non-cyclic GFR-binding peptide
FFLISLSSLEEPVSSAKPIS

SEQ ID NO: 646 - protein, 20 aa, Artificial Sequence
  Non-cyclic GFR-binding peptide
FFLISLSSLKEPVSSPKPVY

SEQ ID NO: 647 - protein, 20 aa, Artificial Sequence
  Non-cyclic GFR-binding peptide
FFLISLSSLQEPVSSPKPVT

SEQ ID NO: 648 - protein, 20 aa, Artificial Sequence
  Non-cyclic GFR-binding peptide
FFLISLSSLKEPVSSAKPVA

SEQ ID NO: 649 - protein, 20 aa, Artificial Sequence
  Non-cyclic GFR-binding peptide
FFLISLSSLKEPVSSAKGVK

SEQ ID NO: 650 - protein, 20 aa, Artificial Sequence
  Non-cyclic GFR-binding peptide
FFLISLSSLKEPVSSAKSAK

SEQ ID NO: 651 - protein, 20 aa, Artificial Sequence
  Non-cyclic GFR-binding peptide
FFLISLSSLREPVSSSAPAA

SEQ ID NO: 652 - protein, 20 aa, Artificial Sequence
  Non-cyclic GFR-binding peptide
FFLISLSSLREPVSSTPPTS

SEQ ID NO: 653 - protein, 20 aa, Artificial Sequence
  Non-cyclic GFR-binding peptide
FFLISLSSLKEPVSSPKPVH

SEQ ID NO: 654 - protein, 20 aa, Artificial Sequence
  Non-cyclic GFR-binding peptide
FFLISLSSTKEPVSSTSPVR

SEQ ID NO: 655 - protein, 20 aa, Artificial Sequence
  Non-cyclic GFR-binding peptide
FFLISLSSLAEPVSSPAASA

SEQ ID NO: 656 - protein, 20 aa, Artificial Sequence
  Non-cyclic GFR-binding peptide
FFLISLSSLDEPVSSPSASA

SEQ ID NO: 657 - protein, 20 aa, Artificial Sequence
  Non-cyclic GFR-binding peptide
FFLISLSSLETPVSSAKPIK

SEQ ID NO: 658 - protein, 20 aa, Artificial Sequence
  Non-cyclic GFR-binding peptide
FFLISLSSLETPVSSAKPIS

SEQ ID NO: 659 - protein, 20 aa, Artificial Sequence
  Non-cyclic GFR-binding peptide
FFLISLSSLKTPASTPKTVH

SEQ ID NO: 660 - protein, 20 aa, Artificial Sequence
  Non-cyclic GFR-binding peptide
FFLISLSSLKTPASSPKPVY

SEQ ID NO: 661 - protein, 20 aa, Artificial Sequence
  Non-cyclic GFR-binding peptide
FFLISLSSLQTPASSPKPVT

SEQ ID NO: 662 - protein, 20 aa, Artificial Sequence
  Non-cyclic GFR-binding peptide
FFLISLSSLKTPASSAKPVA

SEQ ID NO: 663 - protein, 20 aa, Artificial Sequence
  Non-cyclic GFR-binding peptide
FFLISLSSLKTPVSSAKGVK

SEQ ID NO: 664 - protein, 20 aa, Artificial Sequence
  Non-cyclic GFR-binding peptide
FFLISLSSLKTPVSSAKSAK

SEQ ID NO: 665 - protein, 20 aa, Artificial Sequence
  Non-cyclic GFR-binding peptide
FFLISLSSMKTPTSSPGASG

SEQ ID NO: 666 - protein, 20 aa, Artificial Sequence
  Non-cyclic GFR-binding peptide
FFLISLSSLRAPVSSSAPAA

SEQ ID NO: 667 - protein, 20 aa, Artificial Sequence
  Non-cyclic GFR-binding peptide
FFLISLSSLRTPVSSTPPTS

SEQ ID NO: 668 - protein, 20 aa, Artificial Sequence
  Non-cyclic GFR-binding peptide
FFLISLSSLKTPASSPKPVH

SEQ ID NO: 669 - protein, 20 aa, Artificial Sequence
  Non-cyclic GFR-binding peptide
FFLISLSSTKVPASSTSPVR

SEQ ID NO: 670 - protein, 20 aa, Artificial Sequence
  Non-cyclic GFR-binding peptide
FFLISLSSLDQPVSSPSASA

SEQ ID NO: 671 - protein, 20 aa, Artificial Sequence
  Non-cyclic GFR-binding peptide
FFLISLSSQGTPVSELGEDN

SEQ ID NO: 672 - protein, 20 aa, Artificial Sequence
  Non-cyclic GFR-binding peptide
FFLISLSSHHVRSPQSKVSS

SEQ ID NO: 673 - protein, 20 aa, Artificial Sequence
  Non-cyclic GFR-binding peptide
FFLISLSSLQVQTPRSQVNR

SEQ ID NO: 674 - protein, 20 aa, Artificial Sequence
  Non-cyclic GFR-binding peptide
FYLVSIANLETPASSAKPIK

SEQ ID NO: 675 - protein, 20 aa, Artificial Sequence
  Non-cyclic GFR-binding peptide
FYLVSIANMKTPASSPEPIG

SEQ ID NO: 676 - protein, 20 aa, Artificial Sequence
  Non-cyclic GFR-binding peptide
FYLVSIANLETPASSAKPIS

SEQ ID NO: 677 - protein, 20 aa, Artificial Sequence
  Non-cyclic GFR-binding peptide
FYLVSIANLKTPASSAKPVA

SEQ ID NO: 678 - protein, 20 aa, Artificial Sequence
  Non-cyclic GFR-binding peptide
FYLVSIANLKTPASSAKGVK

SEQ ID NO: 679 - protein, 20 aa, Artificial Sequence
  Non-cyclic GFR-binding peptide
FYLVSIANLKTPASSAKSAK

SEQ ID NO: 680 - protein, 20 aa, Artificial Sequence
  Non-cyclic GFR-binding peptide
FYLVSIANMKTPASSPGASG

SEQ ID NO: 681 - protein, 20 aa, Artificial Sequence
  Non-cyclic GFR-binding peptide
FYLVSIANLRTPASSSAPAA

SEQ ID NO: 682 - protein, 20 aa, Artificial Sequence
  Non-cyclic GFR-binding peptide
FYLVSIANLRTPASSTPPTS

SEQ ID NO: 683 - protein, 20 aa, Artificial Sequence
  Non-cyclic GFR-binding peptide
FYLVSIANTKTPASSTSPVR

SEQ ID NO: 684 - protein, 20 aa, Artificial Sequence
  Non-cyclic GFR-binding peptide
FYLVSIANLATPASSPAASA

SEQ ID NO: 685 - protein, 20 aa, Artificial Sequence
  Non-cyclic GFR-binding peptide
FYLVSIANLDTPASSPSASA

SEQ ID NO: 686 - protein, 20 aa, Artificial Sequence
  Non-cyclic GFR-binding peptide
FYLVSIANLETPVSSAKPIK

SEQ ID NO: 687 - protein, 20 aa, Artificial Sequence
  Non-cyclic GFR-binding peptide
FYLVSIANMKEPVSSPEPIG

SEQ ID NO: 688 - protein, 20 aa, Artificial Sequence
  Non-cyclic GFR-binding peptide
FYLVSIANLETPVSSAKPIS

SEQ ID NO: 689 - protein, 20 aa, Artificial Sequence
  Non-cyclic GFR-binding peptide
FYLVSIANLKTPVSSAKGVK

SEQ ID NO: 690 - protein, 20 aa, Artificial Sequence
  Non-cyclic GFR-binding peptide
FYLVSIANLKTPVSSAKSAK

SEQ ID NO: 691 - protein, 20 aa, Artificial Sequence
  Non-cyclic GFR-binding peptide
FYLVSIANMKTPTSSPGASG

SEQ ID NO: 692 - protein, 20 aa, Artificial Sequence
  Non-cyclic GFR-binding peptide
FYLVSIANLRAPVSSSAPAA

SEQ ID NO: 693 - protein, 20 aa, Artificial Sequence
  Non-cyclic GFR-binding peptide
FYLVSIANLRTPVSSTPPTS

SEQ ID NO: 694 - protein, 20 aa, Artificial Sequence
  Non-cyclic GFR-binding peptide
FYLVSIANTKVPASSTSPVR

SEQ ID NO: 695 - protein, 20 aa, Artificial Sequence
  Non-cyclic GFR-binding peptide
FYLVSIANLAQPVSSPAASA

SEQ ID NO: 696 - protein, 20 aa, Artificial Sequence
  Non-cyclic GFR-binding peptide
FYLVSIANLDQSVSSPSASA

SEQ ID NO: 697 - protein, 20 aa, Artificial Sequence
  Non-cyclic GFR-binding peptide
FYLVSIANLDQPVSSPSASA

SEQ ID NO: 698 - protein, 20 aa, Artificial Sequence
  Non-cyclic GFR-binding peptide
FYLVSIANEETPVSELGEDN

SEQ ID NO: 699 - protein, 20 aa, Artificial Sequence
  Non-cyclic GFR-binding peptide
FYLVSIANHHVRSPQSKVSS

SEQ ID NO: 700 - protein, 20 aa, Artificial Sequence
  Non-cyclic GFR-binding peptide
YYLVSTASLETPASSAKPIK

SEQ ID NO: 701 - protein, 20 aa, Artificial Sequence
  Non-cyclic GFR-binding peptide
YYLVSTASMKTPASSPEPIG

SEQ ID NO: 702 - protein, 20 aa, Artificial Sequence
  Non-cyclic GFR-binding peptide
YYLVSTASLETPASSAKPIS

SEQ ID NO: 703 - protein, 20 aa, Artificial Sequence
  Non-cyclic GFR-binding peptide
YYLVSTASLKTPASTPKTVH

SEQ ID NO: 704 - protein, 20 aa, Artificial Sequence
  Non-cyclic GFR-binding peptide
YYLVSTASLKTPASSPKPVY

SEQ ID NO: 705 - protein, 20 aa, Artificial Sequence
  Non-cyclic GFR-binding peptide
YYLVSTASLQTPASSPKPVT

SEQ ID NO: 706 - protein, 20 aa, Artificial Sequence
  Non-cyclic GFR-binding peptide
YYLVSTASLKTPASSAKGVK

SEQ ID NO: 707 - protein, 20 aa, Artificial Sequence
  Non-cyclic GFR-binding peptide
YYLVSTASLKTPASSAKSAK

SEQ ID NO: 708 - protein, 20 aa, Artificial Sequence
  Non-cyclic GFR-binding peptide
YYLVSTASMKTPASSPGASG

SEQ ID NO: 709 - protein, 20 aa, Artificial Sequence
  Non-cyclic GFR-binding peptide
YYLVSTASLRTPASSSAPAA

SEQ ID NO: 710 - protein, 20 aa, Artificial Sequence
  Non-cyclic GFR-binding peptide
YYLVSTASLRTPASSTPPTS

SEQ ID NO: 711 - protein, 20 aa, Artificial Sequence
  Non-cyclic GFR-binding peptide
YYLVSTASLKTPASSPKPVH

SEQ ID NO: 712 - protein, 20 aa, Artificial Sequence
  Non-cyclic GFR-binding peptide
YYLVSTASLETPVSSAKPIS

SEQ ID NO: 713 - protein, 20 aa, Artificial Sequence
  Non-cyclic GFR-binding peptide
YYLVSTASLKTPVSSAKGVK

SEQ ID NO: 714 - protein, 20 aa, Artificial Sequence
  Non-cyclic GFR-binding peptide
YYLVSTASLKTPVSSAKSAK

SEQ ID NO: 715 - protein, 20 aa, Artificial Sequence
  Non-cyclic GFR-binding peptide
YYLVSTASMKTPTSSPGASG

SEQ ID NO: 716 - protein, 20 aa, Artificial Sequence
  Non-cyclic GFR-binding peptide
YYLVSTASLRAPVSSSAPAA

SEQ ID NO: 717 - protein, 20 aa, Artificial Sequence
  Non-cyclic GFR-binding peptide
YYLVSTASLRTPVSSTPPTS

SEQ ID NO: 718 - protein, 20 aa, Artificial Sequence
  Non-cyclic GFR-binding peptide
YYLVSTASTKVPASSTSPVR

SEQ ID NO: 719 - protein, 20 aa, Artificial Sequence
  Non-cyclic GFR-binding peptide
YYLVSTASLAQPVSSPAASA

SEQ ID NO: 720 - protein, 20 aa, Artificial Sequence
  Non-cyclic GFR-binding peptide
YYLVSTASLDQSVSSPSASA

SEQ ID NO: 721 - protein, 20 aa, Artificial Sequence
  Non-cyclic GFR-binding peptide
YYLVSTASLDQPVSSPSASA

SEQ ID NO: 722 - protein, 20 aa, Artificial Sequence
  Non-cyclic GFR-binding peptide
YYLVSTASEETPVSELGEDN

SEQ ID NO: 723 - protein, 20 aa, Artificial Sequence
  Non-cyclic GFR-binding peptide
YYLVSTASQGTPVSELGEDN

SEQ ID NO: 724 - protein, 20 aa, Artificial Sequence
  Non-cyclic GFR-binding peptide
YYLVSTASHHVRSPQSKVSS

SEQ ID NO: 725 - protein, 20 aa, Artificial Sequence
  Non-cyclic GFR-binding peptide
YYLVSTASLQVQTPRSQVNR

SEQ ID NO: 726 - protein, 20 aa, Artificial Sequence
  Non-cyclic GFR-binding peptide
KYLVSIPSMKTPVSSPEPIG

SEQ ID NO: 727 - protein, 20 aa, Artificial Sequence
  Non-cyclic GFR-binding peptide
KYLVSIPSLETPVSSAKPIS

SEQ ID NO: 728 - protein, 20 aa, Artificial Sequence
  Non-cyclic GFR-binding peptide
KYLVSIPSLKTPVSTPKTVH

SEQ ID NO: 729 - protein, 20 aa, Artificial Sequence
  Non-cyclic GFR-binding peptide
KYLVSIPSLKTPVSSPKPVY

SEQ ID NO: 730 - protein, 20 aa, Artificial Sequence
  Non-cyclic GFR-binding peptide
KYLVSIPSLQTPVSSPKPVT

SEQ ID NO: 731 - protein, 20 aa, Artificial Sequence
  Non-cyclic GFR-binding peptide
KYLVSIPSLKTPVSSAKPVA

SEQ ID NO: 732 - protein, 20 aa, Artificial Sequence
  Non-cyclic GFR-binding peptide
KYLVSIPSLKTPVSSAKSAK

SEQ ID NO: 733 - protein, 20 aa, Artificial Sequence
  Non-cyclic GFR-binding peptide
KYLVSIPSLRTPVSSSAPAA

SEQ ID NO: 734 - protein, 20 aa, Artificial Sequence
  Non-cyclic GFR-binding peptide
KYLVSIPSLRTPVSSTPPTS

SEQ ID NO: 735 - protein, 20 aa, Artificial Sequence
  Non-cyclic GFR-binding peptide
KYLVSIPSTKTPVSSTSPVR

SEQ ID NO: 736 - protein, 20 aa, Artificial Sequence
  Non-cyclic GFR-binding peptide
KYLVSIPSLATPVSSPAASA

SEQ ID NO: 737 - protein, 20 aa, Artificial Sequence
  Non-cyclic GFR-binding peptide
KYLVSIPSLDTPVSSPSASA

SEQ ID NO: 738 - protein, 20 aa, Artificial Sequence
  Non-cyclic GFR-binding peptide
KYLVSIPSMKEPVSSPEPIG

SEQ ID NO: 739 - protein, 20 aa, Artificial Sequence
  Non-cyclic GFR-binding peptide
KYLVSIPSLKTPASTPKTVH

SEQ ID NO: 740 - protein, 20 aa, Artificial Sequence
  Non-cyclic GFR-binding peptide
KYLVSIPSLKTPASSPKPVY

SEQ ID NO: 741 - protein, 20 aa, Artificial Sequence
  Non-cyclic GFR-binding peptide
KYLVSIPSLQTPASSPKPVT

SEQ ID NO: 742 - protein, 20 aa, Artificial Sequence
  Non-cyclic GFR-binding peptide
KYLVSIPSLKTPASSAKPVA

SEQ ID NO: 743 - protein, 20 aa, Artificial Sequence
  Non-cyclic GFR-binding peptide
KYLVSIPSMKTPTSSPGASG

SEQ ID NO: 744 - protein, 20 aa, Artificial Sequence
  Non-cyclic GFR-binding peptide
KYLVSIPSLRAPVSSSAPAA

SEQ ID NO: 745 - protein, 20 aa, Artificial Sequence
  Non-cyclic GFR-binding peptide
KYLVSIPSLKTPASSPKPVH

SEQ ID NO: 746 - protein, 20 aa, Artificial Sequence
  Non-cyclic GFR-binding peptide
KYLVSIPSTKVPASSTSPVR

SEQ ID NO: 747 - protein, 20 aa, Artificial Sequence
  Non-cyclic GFR-binding peptide
KYLVSIPSLAQPVSSPAASA

SEQ ID NO: 748 - protein, 20 aa, Artificial Sequence
  Non-cyclic GFR-binding peptide
KYLVSIPSLDQSVSSPSASA

SEQ ID NO: 749 - protein, 20 aa, Artificial Sequence
  Non-cyclic GFR-binding peptide
KYLVSIPSLDQPVSSPSASA

SEQ ID NO: 750 - protein, 20 aa, Artificial Sequence
  Non-cyclic GFR-binding peptide
KYLVSIPSHHVRSPQSKVSS

SEQ ID NO: 751 - protein, 20 aa, Artificial Sequence
  Non-cyclic GFR-binding peptide
KYLVSIPSLQVQTPRSQVNR

SEQ ID NO: 752 - protein, 20 aa, Artificial Sequence
  Non-cyclic GFR-binding peptide
LYLISIPELETPVSSAKPIK

SEQ ID NO: 753 - protein, 20 aa, Artificial Sequence
  Non-cyclic GFR-binding peptide
LYLISIPEMKTPVSSPEPIG

SEQ ID NO: 754 - protein, 20 aa, Artificial Sequence
  Non-cyclic GFR-binding peptide
LYLISIPELETPVSSAKPIS

SEQ ID NO: 755 - protein, 20 aa, Artificial Sequence
  Non-cyclic GFR-binding peptide
LYLISIPELKTPVSTPKTVH

SEQ ID NO: 756 - protein, 20 aa, Artificial Sequence
  Non-cyclic GFR-binding peptide
LYLISIPELKTPVSSPKPVY

SEQ ID NO: 757 - protein, 20 aa, Artificial Sequence
  Non-cyclic GFR-binding peptide
LYLISIPELQTPVSSPKPVT

SEQ ID NO: 758 - protein, 20 aa, Artificial Sequence
  Non-cyclic GFR-binding peptide
LYLISIPELKTPVSSAKPVA

SEQ ID NO: 759 - protein, 20 aa, Artificial Sequence
  Non-cyclic GFR-binding peptide
LYLISIPEMKTPVSSPGASG

SEQ ID NO: 760 - protein, 20 aa, Artificial Sequence
  Non-cyclic GFR-binding peptide
LYLISIPELRTPVSSSAPAA

SEQ ID NO: 761 - protein, 20 aa, Artificial Sequence
  Non-cyclic GFR-binding peptide
LYLISIPELRTPVSSTPPTS

SEQ ID NO: 762 - protein, 20 aa, Artificial Sequence
  Non-cyclic GFR-binding peptide
LYLISIPELKTPVSSPKPVH

SEQ ID NO: 763 - protein, 20 aa, Artificial Sequence
  Non-cyclic GFR-binding peptide
LYLISIPETKTPVSSTSPVR

SEQ ID NO: 764 - protein, 20 aa, Artificial Sequence
  Non-cyclic GFR-binding peptide
LYLISIPELATPVSSPAASA

SEQ ID NO: 765 - protein, 20 aa, Artificial Sequence
  Non-cyclic GFR-binding peptide
LYLISIPELDTPVSSPSASA

SEQ ID NO: 766 - protein, 20 aa, Artificial Sequence
  Non-cyclic GFR-binding peptide
LYLISIPEMKEPVSSPEPIG

SEQ ID NO: 767 - protein, 20 aa, Artificial Sequence
  Non-cyclic GFR-binding peptide
LYLISIPELKTPASTPKTVH

SEQ ID NO: 768 - protein, 20 aa, Artificial Sequence
  Non-cyclic GFR-binding peptide
LYLISIPELKTPASSPKPVY

SEQ ID NO: 769 - protein, 20 aa, Artificial Sequence
  Non-cyclic GFR-binding peptide
LYLISIPELQTPASSPKPVT

SEQ ID NO: 770 - protein, 20 aa, Artificial Sequence
  Non-cyclic GFR-binding peptide
LYLISIPEMKTPTSSPGASG

SEQ ID NO: 771 - protein, 20 aa, Artificial Sequence
  Non-cyclic GFR-binding peptide
LYLISIPELRAPVSSSAPAA

SEQ ID NO: 772 - protein, 20 aa, Artificial Sequence
  Non-cyclic GFR-binding peptide
LYLISIPELAQPVSSPAASA

SEQ ID NO: 773 - protein, 20 aa, Artificial Sequence
  Non-cyclic GFR-binding peptide
LYLISIPELDQSVSSPSASA

SEQ ID NO: 774 - protein, 20 aa, Artificial Sequence
  Non-cyclic GFR-binding peptide
LYLISIPELDQPVSSPSASA

SEQ ID NO: 775 - protein, 20 aa, Artificial Sequence
  Non-cyclic GFR-binding peptide
LYLISIPEHHVRSPQSKVSS

SEQ ID NO: 776 - protein, 20 aa, Artificial Sequence
  Non-cyclic GFR-binding peptide
LYLISIPELQVQTPRSQVNR

SEQ ID NO: 777 - protein, 20 aa, Artificial Sequence
  Non-cyclic GFR-binding peptide
FYLMNIPSLKTPTSTPKTVH

SEQ ID NO: 778 - protein, 20 aa, Artificial Sequence
  Non-cyclic GFR-binding peptide
FYLMNIPSLQTPTSSPKPVT

SEQ ID NO: 779 - protein, 20 aa, Artificial Sequence
  Non-cyclic GFR-binding peptide
FYLMNIPSLKTPTSSAKPVA

SEQ ID NO: 780 - protein, 20 aa, Artificial Sequence
  Non-cyclic GFR-binding peptide
FYLMNIPSLKTPTSSAKGVK

SEQ ID NO: 781 - protein, 20 aa, Artificial Sequence
  Non-cyclic GFR-binding peptide
FYLMNIPSLKTPTSSAKSAK

SEQ ID NO: 782 - protein, 20 aa, Artificial Sequence
  Non-cyclic GFR-binding peptide
FYLMNIPSLRTPTSSSAPAA

SEQ ID NO: 783 - protein, 20 aa, Artificial Sequence
  Non-cyclic GFR-binding peptide
FYLMNIPSLRTPTSSTPPTS

SEQ ID NO: 784 - protein, 20 aa, Artificial Sequence
  Non-cyclic GFR-binding peptide
FYLMNIPSLKTPTSSPKPVH

SEQ ID NO: 785 - protein, 20 aa, Artificial Sequence
  Non-cyclic GFR-binding peptide
FYLMNIPSTKTPTSSTSPVR

SEQ ID NO: 786 - protein, 20 aa, Artificial Sequence
  Non-cyclic GFR-binding peptide
FYLMNIPSLATPTSSPAASA

SEQ ID NO: 787 - protein, 20 aa, Artificial Sequence
  Non-cyclic GFR-binding peptide
FYLMNIPSLDTPTSSPSASA

SEQ ID NO: 788 - protein, 20 aa, Artificial Sequence
  Non-cyclic GFR-binding peptide
FYLMNIPSLETPVSSAKPIK

SEQ ID NO: 789 - protein, 20 aa, Artificial Sequence
  Non-cyclic GFR-binding peptide
FYLMNIPSMKEPVSSPEPIG

SEQ ID NO: 790 - protein, 20 aa, Artificial Sequence
  Non-cyclic GFR-binding peptide
FYLMNIPSLETPVSSAKPIS

SEQ ID NO: 791 - protein, 20 aa, Artificial Sequence
  Non-cyclic GFR-binding peptide
FYLMNIPSLKTPASTPKTVH

SEQ ID NO: 792 - protein, 20 aa, Artificial Sequence
  Non-cyclic GFR-binding peptide
FYLMNIPSLKTPASSPKPVY

SEQ ID NO: 793 - protein, 20 aa, Artificial Sequence
  Non-cyclic GFR-binding peptide
FYLMNIPSLQTPASSPKPVT

SEQ ID NO: 794 - protein, 20 aa, Artificial Sequence
  Non-cyclic GFR-binding peptide
FYLMNIPSLKTPASSAKPVA

SEQ ID NO: 795 - protein, 20 aa, Artificial Sequence
  Non-cyclic GFR-binding peptide
FYLMNIPSLKTPVSSAKGVK

SEQ ID NO: 796 - protein, 20 aa, Artificial Sequence
  Non-cyclic GFR-binding peptide
FYLMNIPSLKTPVSSAKSAK

SEQ ID NO: 797 - protein, 20 aa, Artificial Sequence
  Non-cyclic GFR-binding peptide
FYLMNIPSLRAPVSSSAPAA

SEQ ID NO: 798 - protein, 20 aa, Artificial Sequence
  Non-cyclic GFR-binding peptide
FYLMNIPSLRTPVSSTPPTS

SEQ ID NO: 799 - protein, 20 aa, Artificial Sequence
  Non-cyclic GFR-binding peptide
FYLMNIPSLKTPASSPKPVH

SEQ ID NO: 800 - protein, 20 aa, Artificial Sequence
  Non-cyclic GFR-binding peptide
FYLMNIPSTKVPASSTSPVR

SEQ ID NO: 801 - protein, 20 aa, Artificial Sequence
  Non-cyclic GFR-binding peptide
FYLMNIPSLAQPVSSPAASA

SEQ ID NO: 802 - protein, 20 aa, Artificial Sequence
  Non-cyclic GFR-binding peptide
FYLMNIPSLDQSVSSPSASA

SEQ ID NO: 803 - protein, 20 aa, Artificial Sequence
  Non-cyclic GFR-binding peptide
FYLMNIPSLDQPVSSPSASA

SEQ ID NO: 804 - protein, 20 aa, Artificial Sequence
  Non-cyclic GFR-binding peptide
FYLMNIPSEETPVSELGEDN

SEQ ID NO: 805 - protein, 20 aa, Artificial Sequence
  Non-cyclic GFR-binding peptide
FYLMNIPSQGTPVSELGEDN

SEQ ID NO: 806 - protein, 20 aa, Artificial Sequence
  Non-cyclic GFR-binding peptide
FYLMNIPSHHVRSPQSKVSS

SEQ ID NO: 807 - protein, 20 aa, Artificial Sequence
  Non-cyclic GFR-binding peptide
FYLMNIPSLQVQTPRSQVNR

SEQ ID NO: 808 - protein, 20 aa, Artificial Sequence
  Non-cyclic GFR-binding peptide
IYLISIPSLEAPVSSAKPIK

SEQ ID NO: 809 - protein, 20 aa, Artificial Sequence
  Non-cyclic GFR-binding peptide
IYLISIPSLEAPVSSAKPIS

SEQ ID NO: 810 - protein, 20 aa, Artificial Sequence
  Non-cyclic GFR-binding peptide
IYLISIPSLKAPVSTPKTVH

SEQ ID NO: 811 - protein, 20 aa, Artificial Sequence
  Non-cyclic GFR-binding peptide
IYLISIPSLKAPVSSPKPVY

SEQ ID NO: 812 - protein, 20 aa, Artificial Sequence
  Non-cyclic GFR-binding peptide
IYLISIPSLQAPVSSPKPVT

SEQ ID NO: 813 - protein, 20 aa, Artificial Sequence
  Non-cyclic GFR-binding peptide
IYLISIPSLKAPVSSAKPVA

SEQ ID NO: 814 - protein, 20 aa, Artificial Sequence
  Non-cyclic GFR-binding peptide
IYLISIPSLKAPVSSAKGVK

SEQ ID NO: 815 - protein, 20 aa, Artificial Sequence
  Non-cyclic GFR-binding peptide
IYLISIPSLKAPVSSAKSAK

SEQ ID NO: 816 - protein, 20 aa, Artificial Sequence
  Non-cyclic GFR-binding peptide
IYLISIPSMKAPVSSPGASG

SEQ ID NO: 817 - protein, 20 aa, Artificial Sequence
  Non-cyclic GFR-binding peptide
IYLISIPSLRAPVSSTPPTS

SEQ ID NO: 818 - protein, 20 aa, Artificial Sequence
  Non-cyclic GFR-binding peptide
IYLISIPSLKAPVSSPKPVH

SEQ ID NO: 819 - protein, 20 aa, Artificial Sequence
  Non-cyclic GFR-binding peptide
IYLISIPSLDAPVSSPSASA

SEQ ID NO: 820 - protein, 20 aa, Artificial Sequence
  Non-cyclic GFR-binding peptide
IYLISIPSLETPVSSAKPIK

SEQ ID NO: 821 - protein, 20 aa, Artificial Sequence
  Non-cyclic GFR-binding peptide
IYLISIPSLETPVSSAKPIS

SEQ ID NO: 822 - protein, 20 aa, Artificial Sequence
  Non-cyclic GFR-binding peptide
IYLISIPSLKTPASTPKTVH

SEQ ID NO: 823 - protein, 20 aa, Artificial Sequence
  Non-cyclic GFR-binding peptide
IYLISIPSLKTPASSPKPVY

SEQ ID NO: 824 - protein, 20 aa, Artificial Sequence
  Non-cyclic GFR-binding peptide
IYLISIPSLKTPASSAKPVA

SEQ ID NO: 825 - protein, 20 aa, Artificial Sequence
  Non-cyclic GFR-binding peptide
IYLISIPSLKTPVSSAKGVK

SEQ ID NO: 826 - protein, 20 aa, Artificial Sequence
  Non-cyclic GFR-binding peptide
IYLISIPSLKTPVSSAKSAK

SEQ ID NO: 827 - protein, 20 aa, Artificial Sequence
  Non-cyclic GFR-binding peptide
IYLISIPSMKTPTSSPGASG

SEQ ID NO: 828 - protein, 20 aa, Artificial Sequence
  Non-cyclic GFR-binding peptide
IYLISIPSLRTPVSSTPPTS

SEQ ID NO: 829 - protein, 20 aa, Artificial Sequence
  Non-cyclic GFR-binding peptide
IYLISIPSLKTPASSPKPVH

SEQ ID NO: 830 - protein, 20 aa, Artificial Sequence
  Non-cyclic GFR-binding peptide
IYLISIPSTKVPASSTSPVR

SEQ ID NO: 831 - protein, 20 aa, Artificial Sequence
  Non-cyclic GFR-binding peptide
IYLISIPSLAQPVSSPAASA

SEQ ID NO: 832 - protein, 20 aa, Artificial Sequence
  Non-cyclic GFR-binding peptide
IYLISIPSLDQSVSSPSASA

SEQ ID NO: 833 - protein, 20 aa, Artificial Sequence
  Non-cyclic GFR-binding peptide
IYLISIPSLDQPVSSPSASA

SEQ ID NO: 834 - protein, 20 aa, Artificial Sequence
  Non-cyclic GFR-binding peptide
IYLISIPSQGTPVSELGEDN

SEQ ID NO: 835 - protein, 20 aa, Artificial Sequence
  Non-cyclic GFR-binding peptide
IYLISIPSHHVRSPQSKVSS

SEQ ID NO: 836 - protein, 20 aa, Artificial Sequence
  Non-cyclic GFR-binding peptide
IYLISIPSLQVQTPRSQVNR

SEQ ID NO: 837 - protein, 20 aa, Artificial Sequence
  Non-cyclic GFR-binding peptide
IFLISIPSLETPVSSAKPIK

SEQ ID NO: 838 - protein, 20 aa, Artificial Sequence
  Non-cyclic GFR-binding peptide
IFLISIPSMKTPVSSPEPIG

SEQ ID NO: 839 - protein, 20 aa, Artificial Sequence
  Non-cyclic GFR-binding peptide
IFLISIPSLETPVSSAKPIS

SEQ ID NO: 840 - protein, 20 aa, Artificial Sequence
  Non-cyclic GFR-binding peptide
IFLISIPSLKTPVSTPKTVH

SEQ ID NO: 841 - protein, 20 aa, Artificial Sequence
  Non-cyclic GFR-binding peptide
IFLISIPSLKTPVSSPKPVY

SEQ ID NO: 842 - protein, 20 aa, Artificial Sequence
  Non-cyclic GFR-binding peptide
IFLISIPSLQTPVSSPKPVT

SEQ ID NO: 843 - protein, 20 aa, Artificial Sequence
  Non-cyclic GFR-binding peptide
IFLISIPSLKTPVSSAKPVA

SEQ ID NO: 844 - protein, 20 aa, Artificial Sequence
  Non-cyclic GFR-binding peptide
IFLISIPSLKTPVSSAKGVK

SEQ ID NO: 845 - protein, 20 aa, Artificial Sequence
  Non-cyclic GFR-binding peptide
IFLISIPSLKTPVSSAKSAK

SEQ ID NO: 846 - protein, 20 aa, Artificial Sequence
  Non-cyclic GFR-binding peptide
IFLISIPSMKTPVSSPGASG

SEQ ID NO: 847 - protein, 20 aa, Artificial Sequence
  Non-cyclic GFR-binding peptide
IFLISIPSLRTPVSSSAPAA

SEQ ID NO: 848 - protein, 20 aa, Artificial Sequence
  Non-cyclic GFR-binding peptide
IFLISIPSLKTPVSSPKPVH

SEQ ID NO: 849 - protein, 20 aa, Artificial Sequence
  Non-cyclic GFR-binding peptide
IFLISIPSTKTPVSSTSPVR

SEQ ID NO: 850 - protein, 20 aa, Artificial Sequence
  Non-cyclic GFR-binding peptide
IFLISIPSLATPVSSPAASA

SEQ ID NO: 851 - protein, 20 aa, Artificial Sequence
  Non-cyclic GFR-binding peptide
IFLISIPSLDTPVSSPSASA

SEQ ID NO: 852 - protein, 20 aa, Artificial Sequence
  Non-cyclic GFR-binding peptide
IFLISIPSMKEPVSSPEPIG

SEQ ID NO: 853 - protein, 20 aa, Artificial Sequence
  Non-cyclic GFR-binding peptide
IFLISIPSLKTPASTPKTVH

SEQ ID NO: 854 - protein, 20 aa, Artificial Sequence
  Non-cyclic GFR-binding peptide
IFLISIPSLKTPASSPKPVY

SEQ ID NO: 855 - protein, 20 aa, Artificial Sequence
  Non-cyclic GFR-binding peptide
IFLISIPSLQTPASSPKPVT

SEQ ID NO: 856 - protein, 20 aa, Artificial Sequence
  Non-cyclic GFR-binding peptide
IFLISIPSLKTPASSAKPVA

SEQ ID NO: 857 - protein, 20 aa, Artificial Sequence
  Non-cyclic GFR-binding peptide
IFLISIPSMKTPTSSPGASG

SEQ ID NO: 858 - protein, 20 aa, Artificial Sequence
  Non-cyclic GFR-binding peptide
IFLISIPSLRAPVSSSAPAA

SEQ ID NO: 859 - protein, 20 aa, Artificial Sequence
  Non-cyclic GFR-binding peptide
IFLISIPSLKTPASSPKPVH

SEQ ID NO: 860 - protein, 20 aa, Artificial Sequence
  Non-cyclic GFR-binding peptide
IFLISIPSTKVPASSTSPVR

SEQ ID NO: 861 - protein, 20 aa, Artificial Sequence
  Non-cyclic GFR-binding peptide
IFLISIPSLAQPVSSPAASA

SEQ ID NO: 862 - protein, 20 aa, Artificial Sequence
  Non-cyclic GFR-binding peptide
IFLISIPSLDQSVSSPSASA

SEQ ID NO: 863 - protein, 20 aa, Artificial Sequence
  Non-cyclic GFR-binding peptide
IFLISIPSLDQPVSSPSASA

SEQ ID NO: 864 - protein, 20 aa, Artificial Sequence
  Non-cyclic GFR-binding peptide
VYLMSLPKLEVPASSAKPIK

SEQ ID NO: 865 - protein, 20 aa, Artificial Sequence
  Non-cyclic GFR-binding peptide
VYLMSLPKMKVPASSPEPIG

SEQ ID NO: 866 - protein, 20 aa, Artificial Sequence
  Non-cyclic GFR-binding peptide
VYLMSLPKLEVPASSAKPIS

SEQ ID NO: 867 - protein, 20 aa, Artificial Sequence
  Non-cyclic GFR-binding peptide
VYLMSLPKLKVPASTPKTVH

SEQ ID NO: 868 - protein, 20 aa, Artificial Sequence
  Non-cyclic GFR-binding peptide
VYLMSLPKLKVPASSPKPVY

SEQ ID NO: 869 - protein, 20 aa, Artificial Sequence
  Non-cyclic GFR-binding peptide
VYLMSLPKLQVPASSPKPVT

SEQ ID NO: 870 - protein, 20 aa, Artificial Sequence
  Non-cyclic GFR-binding peptide
VYLMSLPKLKVPASSAKPVA

SEQ ID NO: 871 - protein, 20 aa, Artificial Sequence
  Non-cyclic GFR-binding peptide
VYLMSLPKLKVPASSAKGVK

SEQ ID NO: 872 - protein, 20 aa, Artificial Sequence
  Non-cyclic GFR-binding peptide
VYLMSLPKLKVPASSAKSAK

SEQ ID NO: 873 - protein, 20 aa, Artificial Sequence
  Non-cyclic GFR-binding peptide
VYLMSLPKMKVPASSPGASG

SEQ ID NO: 874 - protein, 20 aa, Artificial Sequence
  Non-cyclic GFR-binding peptide
VYLMSLPKLRVPASSSAPAA

SEQ ID NO: 875 - protein, 20 aa, Artificial Sequence
  Non-cyclic GFR-binding peptide
VYLMSLPKLRVPASSTPPTS

SEQ ID NO: 876 - protein, 20 aa, Artificial Sequence
  Non-cyclic GFR-binding peptide
VYLMSLPKLKVPASSPKPVH

SEQ ID NO: 877 - protein, 20 aa, Artificial Sequence
  Non-cyclic GFR-binding peptide
VYLMSLPKLAVPASSPAASA

SEQ ID NO: 878 - protein, 20 aa, Artificial Sequence
  Non-cyclic GFR-binding peptide
VYLMSLPKLDVPASSPSASA

SEQ ID NO: 879 - protein, 20 aa, Artificial Sequence
  Non-cyclic GFR-binding peptide
VYLMSLPKLETPVSSAKPIK

SEQ ID NO: 880 - protein, 20 aa, Artificial Sequence
  Non-cyclic GFR-binding peptide
VYLMSLPKMKEPVSSPEPIG

SEQ ID NO: 881 - protein, 20 aa, Artificial Sequence
  Non-cyclic GFR-binding peptide
VYLMSLPKLETPVSSAKPIS

SEQ ID NO: 882 - protein, 20 aa, Artificial Sequence
  Non-cyclic GFR-binding peptide
VYLMSLPKLKTPASTPKTVH

SEQ ID NO: 883 - protein, 20 aa, Artificial Sequence
  Non-cyclic GFR-binding peptide
VYLMSLPKLKTPASSPKPVY

SEQ ID NO: 884 - protein, 20 aa, Artificial Sequence
  Non-cyclic GFR-binding peptide
VYLMSLPKLQTPASSPKPVT

SEQ ID NO: 885 - protein, 20 aa, Artificial Sequence
  Non-cyclic GFR-binding peptide
VYLMSLPKLKTPASSAKPVA

SEQ ID NO: 886 - protein, 20 aa, Artificial Sequence
  Non-cyclic GFR-binding peptide
VYLMSLPKLKTPVSSAKGVK

SEQ ID NO: 887 - protein, 20 aa, Artificial Sequence
  Non-cyclic GFR-binding peptide
VYLMSLPKLKTPVSSAKSAK

SEQ ID NO: 888 - protein, 20 aa, Artificial Sequence
  Non-cyclic GFR-binding peptide
VYLMSLPKMKTPTSSPGASG

SEQ ID NO: 889 - protein, 20 aa, Artificial Sequence
  Non-cyclic GFR-binding peptide
VYLMSLPKLRAPVSSSAPAA

SEQ ID NO: 890 - protein, 20 aa, Artificial Sequence
  Non-cyclic GFR-binding peptide
VYLMSLPKLRTPVSSTPPTS

SEQ ID NO: 891 - protein, 20 aa, Artificial Sequence
  Non-cyclic GFR-binding peptide
VYLMSLPKLKTPASSPKPVH

SEQ ID NO: 892 - protein, 20 aa, Artificial Sequence
  Non-cyclic GFR-binding peptide
VYLMSLPKLAQPVSSPAASA

SEQ ID NO: 893 - protein, 20 aa, Artificial Sequence
  Non-cyclic GFR-binding peptide
VYLMSLPKLDQSVSSPSASA

SEQ ID NO: 894 - protein, 20 aa, Artificial Sequence
  Non-cyclic GFR-binding peptide
VYLMSLPKLDQPVSSPSASA

SEQ ID NO: 895 - protein, 20 aa, Artificial Sequence
  Non-cyclic GFR-binding peptide
VYLMSLPKEETPVSELGEDN

SEQ ID NO: 896 - protein, 20 aa, Artificial Sequence
  Non-cyclic GFR-binding peptide
VYLMSLPKQGTPVSELGEDN

SEQ ID NO: 897 - protein, 20 aa, Artificial Sequence
  Non-cyclic GFR-binding peptide
YYVIPLPELKQPVSTPKTVH

SEQ ID NO: 898 - protein, 20 aa, Artificial Sequence
  Non-cyclic GFR-binding peptide
YYVIPLPELKQPVSSPKPVY

SEQ ID NO: 899 - protein, 20 aa, Artificial Sequence
  Non-cyclic GFR-binding peptide
YYVIPLPELQQPVSSPKPVT

SEQ ID NO: 900 - protein, 20 aa, Artificial Sequence
  Non-cyclic GFR-binding peptide
YYVIPLPELKQPVSSAKPVA

SEQ ID NO: 901 - protein, 20 aa, Artificial Sequence
  Non-cyclic GFR-binding peptide
YYVIPLPEMKQPVSSPGASG

SEQ ID NO: 902 - protein, 20 aa, Artificial Sequence
  Non-cyclic GFR-binding peptide
YYVIPLPELRQPVSSSAPAA

SEQ ID NO: 903 - protein, 20 aa, Artificial Sequence
  Non-cyclic GFR-binding peptide
YYVIPLPELRQPVSSTPPTS

SEQ ID NO: 904 - protein, 20 aa, Artificial Sequence
  Non-cyclic GFR-binding peptide
YYVIPLPELKQPVSSPKPVH

SEQ ID NO: 905 - protein, 20 aa, Artificial Sequence
  Non-cyclic GFR-binding peptide
YYVIPLPETKQPVSSTSPVR

SEQ ID NO: 906 - protein, 20 aa, Artificial Sequence
  Non-cyclic GFR-binding peptide
YYVIPLPELDQPVSSPSASA

SEQ ID NO: 907 - protein, 20 aa, Artificial Sequence
  Non-cyclic GFR-binding peptide
YYVIPLPEMKEPVSSPEPIG

SEQ ID NO: 908 - protein, 20 aa, Artificial Sequence
  Non-cyclic GFR-binding peptide
YYVIPLPELETPVSSAKPIS

SEQ ID NO: 909 - protein, 20 aa, Artificial Sequence
  Non-cyclic GFR-binding peptide
YYVIPLPELKTPASTPKTVH

SEQ ID NO: 910 - protein, 20 aa, Artificial Sequence
  Non-cyclic GFR-binding peptide
YYVIPLPELKTPASSPKPVY

SEQ ID NO: 911 - protein, 20 aa, Artificial Sequence
  Non-cyclic GFR-binding peptide
YYVIPLPELQTPASSPKPVT

SEQ ID NO: 912 - protein, 20 aa, Artificial Sequence
  Non-cyclic GFR-binding peptide
YYVIPLPELKTPVSSAKGVK

SEQ ID NO: 913 - protein, 20 aa, Artificial Sequence
  Non-cyclic GFR-binding peptide
YYVIPLPELKTPVSSAKSAK

SEQ ID NO: 914 - protein, 20 aa, Artificial Sequence
  Non-cyclic GFR-binding peptide
YYVIPLPEMKTPTSSPGASG

SEQ ID NO: 915 - protein, 20 aa, Artificial Sequence
  Non-cyclic GFR-binding peptide
YYVIPLPELRAPVSSSAPAA

SEQ ID NO: 916 - protein, 20 aa, Artificial Sequence
  Non-cyclic GFR-binding peptide
YYVIPLPELRTPVSSTPPTS

SEQ ID NO: 917 - protein, 20 aa, Artificial Sequence
  Non-cyclic GFR-binding peptide
YYVIPLPELKTPASSPKPVH

SEQ ID NO: 918 - protein, 20 aa, Artificial Sequence
  Non-cyclic GFR-binding peptide
YYVIPLPETKVPASSTSPVR

SEQ ID NO: 919 - protein, 20 aa, Artificial Sequence
  Non-cyclic GFR-binding peptide
YYVIPLPELDQSVSSPSASA

SEQ ID NO: 920 - protein, 20 aa, Artificial Sequence
  Non-cyclic GFR-binding peptide
YYVIPLPEEETPVSELGEDN

SEQ ID NO: 921 - protein, 20 aa, Artificial Sequence
  Non-cyclic GFR-binding peptide
YYVIPLPEQGTPVSELGEDN

SEQ ID NO: 922 - protein, 20 aa, Artificial Sequence
  Non-cyclic GFR-binding peptide
YYVIPLPEHHVRSPQSKVSS

SEQ ID NO: 923 - protein, 20 aa, Artificial Sequence
  Non-cyclic GFR-binding peptide
YYVIPLPELQVQTPRSQVNR

SEQ ID NO: 924 - protein, 20 aa, Artificial Sequence
  Non-cyclic GFR-binding peptide
YYLITLPEMKQSVSSPEPIG

SEQ ID NO: 925 - protein, 20 aa, Artificial Sequence
  Non-cyclic GFR-binding peptide
YYLITLPELEQSVSSAKPIS

SEQ ID NO: 926 - protein, 20 aa, Artificial Sequence
  Non-cyclic GFR-binding peptide
YYLITLPELKQSVSTPKTVH

SEQ ID NO: 927 - protein, 20 aa, Artificial Sequence
  Non-cyclic GFR-binding peptide
YYLITLPELKQSVSSPKPVY

SEQ ID NO: 928 - protein, 20 aa, Artificial Sequence
  Non-cyclic GFR-binding peptide
YYLITLPELQQSVSSPKPVT

SEQ ID NO: 929 - protein, 20 aa, Artificial Sequence
  Non-cyclic GFR-binding peptide
YYLITLPELKQSVSSAKPVA

SEQ ID NO: 930 - protein, 20 aa, Artificial Sequence
  Non-cyclic GFR-binding peptide
YYLITLPELKQSVSSAKSAK

SEQ ID NO: 931 - protein, 20 aa, Artificial Sequence
  Non-cyclic GFR-binding peptide
YYLITLPEMKQSVSSPGASG

SEQ ID NO: 932 - protein, 20 aa, Artificial Sequence
  Non-cyclic GFR-binding peptide
YYLITLPELRQSVSSSAPAA

SEQ ID NO: 933 - protein, 20 aa, Artificial Sequence
  Non-cyclic GFR-binding peptide
YYLITLPELRQSVSSTPPTS

SEQ ID NO: 934 - protein, 20 aa, Artificial Sequence
  Non-cyclic GFR-binding peptide
YYLITLPELKQSVSSPKPVH

SEQ ID NO: 935 - protein, 20 aa, Artificial Sequence
  Non-cyclic GFR-binding peptide
YYLITLPETKQSVSSTSPVR

SEQ ID NO: 936 - protein, 20 aa, Artificial Sequence
  Non-cyclic GFR-binding peptide
YYLITLPELAQSVSSPAASA

SEQ ID NO: 937 - protein, 20 aa, Artificial Sequence
  Non-cyclic GFR-binding peptide
YYLITLPELETPVSSAKPIK

SEQ ID NO: 938 - protein, 20 aa, Artificial Sequence
  Non-cyclic GFR-binding peptide
YYLITLPEMKEPVSSPEPIG

SEQ ID NO: 939 - protein, 20 aa, Artificial Sequence
  Non-cyclic GFR-binding peptide
YYLITLPELETPVSSAKPIS

SEQ ID NO: 940 - protein, 20 aa, Artificial Sequence
  Non-cyclic GFR-binding peptide
YYLITLPELKTPASTPKTVH

SEQ ID NO: 941 - protein, 20 aa, Artificial Sequence
  Non-cyclic GFR-binding peptide
YYLITLPELKTPASSPKPVY

SEQ ID NO: 942 - protein, 20 aa, Artificial Sequence
  Non-cyclic GFR-binding peptide
YYLITLPELQTPASSPKPVT

SEQ ID NO: 943 - protein, 20 aa, Artificial Sequence
  Non-cyclic GFR-binding peptide
YYLITLPELKTPASSAKPVA

SEQ ID NO: 944 - protein, 20 aa, Artificial Sequence
  Non-cyclic GFR-binding peptide
YYLITLPELKTPVSSAKSAK

SEQ ID NO: 945 - protein, 20 aa, Artificial Sequence
  Non-cyclic GFR-binding peptide
YYLITLPEMKTPTSSPGASG

SEQ ID NO: 946 - protein, 20 aa, Artificial Sequence
  Non-cyclic GFR-binding peptide
YYLITLPELRAPVSSSAPAA

SEQ ID NO: 947 - protein, 20 aa, Artificial Sequence
  Non-cyclic GFR-binding peptide
YYLITLPELRTPVSSTPPTS

SEQ ID NO: 948 - protein, 20 aa, Artificial Sequence
  Non-cyclic GFR-binding peptide
YYLITLPELKTPASSPKPVH

SEQ ID NO: 949 - protein, 20 aa, Artificial Sequence
  Non-cyclic GFR-binding peptide
YYLITLPETKVPASSTSPVR

SEQ ID NO: 950 - protein, 20 aa, Artificial Sequence
  Non-cyclic GFR-binding peptide
YYLITLPEQGTPVSELGEDN

SEQ ID NO: 951 - protein, 20 aa, Artificial Sequence
  Non-cyclic GFR-binding peptide
YYLITLPEHHVRSPQSKVSS

SEQ ID NO: 952 - protein, 20 aa, Artificial Sequence
  Non-cyclic GFR-binding peptide
YYLITLPELQVQTPRSQVNR

SEQ ID NO: 953 - protein, 20 aa, Artificial Sequence
  Non-cyclic GFR-binding peptide
YYLITLPELEQPVSSAKPIK

SEQ ID NO: 954 - protein, 20 aa, Artificial Sequence
  Non-cyclic GFR-binding peptide
YYLITLPEMKQPVSSPEPIG

SEQ ID NO: 955 - protein, 20 aa, Artificial Sequence
  Non-cyclic GFR-binding peptide
YYLITLPELEQPVSSAKPIS

SEQ ID NO: 956 - protein, 20 aa, Artificial Sequence
  Non-cyclic GFR-binding peptide
YYLITLPELKQPVSTPKTVH

SEQ ID NO: 957 - protein, 20 aa, Artificial Sequence
  Non-cyclic GFR-binding peptide
YYLITLPELKQPVSSPKPVY

SEQ ID NO: 958 - protein, 20 aa, Artificial Sequence
  Non-cyclic GFR-binding peptide
YYLITLPELQQPVSSPKPVT

SEQ ID NO: 959 - protein, 20 aa, Artificial Sequence
  Non-cyclic GFR-binding peptide
YYLITLPELKQPVSSAKPVA

SEQ ID NO: 960 - protein, 20 aa, Artificial Sequence
  Non-cyclic GFR-binding peptide
YYLITLPELKQPVSSAKGVK

SEQ ID NO: 961 - protein, 20 aa, Artificial Sequence
  Non-cyclic GFR-binding peptide
YYLITLPELKQPVSSAKSAK

SEQ ID NO: 962 - protein, 20 aa, Artificial Sequence
  Non-cyclic GFR-binding peptide
YYLITLPEMKQPVSSPGASG

SEQ ID NO: 963 - protein, 20 aa, Artificial Sequence
  Non-cyclic GFR-binding peptide
YYLITLPELRQPVSSSAPAA

SEQ ID NO: 964 - protein, 20 aa, Artificial Sequence
  Non-cyclic GFR-binding peptide
YYLITLPELRQPVSSTPPTS

SEQ ID NO: 965 - protein, 20 aa, Artificial Sequence
  Non-cyclic GFR-binding peptide
YYLITLPELKQPVSSPKPVH

SEQ ID NO: 966 - protein, 20 aa, Artificial Sequence
  Non-cyclic GFR-binding peptide
YYLITLPETKQPVSSTSPVR

SEQ ID NO: 967 - protein, 20 aa, Artificial Sequence
  Non-cyclic GFR-binding peptide
MIQMTINSQGTPVSELGEDN

SEQ ID NO: 968 - protein, 20 aa, Artificial Sequence
  Non-cyclic GFR-binding peptide
MIQMTINSMKEPVSSPEPIG

SEQ ID NO: 969 - protein, 20 aa, Artificial Sequence
  Non-cyclic GFR-binding peptide
MIQMTINSLKTPASTPKTVH

SEQ ID NO: 970 - protein, 20 aa, Artificial Sequence
  Non-cyclic GFR-binding peptide
MIQMTINSLKTPASSPKPVY

SEQ ID NO: 971 - protein, 20 aa, Artificial Sequence
  Non-cyclic GFR-binding peptide
MIQMTINSLQTPASSPKPVT

SEQ ID NO: 972 - protein, 20 aa, Artificial Sequence
  Non-cyclic GFR-binding peptide
MIQMTINSLKTPASSAKPVA

SEQ ID NO: 973 - protein, 20 aa, Artificial Sequence
  Non-cyclic GFR-binding peptide
MIQMTINSLKTPASSPKPVH

SEQ ID NO: 974 - protein, 20 aa, Artificial Sequence
  Non-cyclic GFR-binding peptide
MIQMTINSTKVPASSTSPVR

SEQ ID NO: 975 - protein, 20 aa, Artificial Sequence
  Non-cyclic GFR-binding peptide
MIQMTINSLAQPVSSPAASA

SEQ ID NO: 976 - protein, 20 aa, Artificial Sequence
  Non-cyclic GFR-binding peptide
MIQMTINSLDQSVSSPSASA

SEQ ID NO: 977 - protein, 20 aa, Artificial Sequence
  Non-cyclic GFR-binding peptide
MIQMTINSLDQPVSSPSASA

SEQ ID NO: 978 - protein, 20 aa, Artificial Sequence
  Non-cyclic GFR-binding peptide
MIQMTINSHHVRSPQSKVSS

SEQ ID NO: 979 - protein, 20 aa, Artificial Sequence
  Non-cyclic GFR-binding peptide
MIQMTINSLQVQTPRSQVNR

SEQ ID NO: 980 - protein, 20 aa, Artificial Sequence
  Non-cyclic GFR-binding peptide
VKAVKVSRLQVRSPRSQVNR

SEQ ID NO: 981 - protein, 20 aa, Artificial Sequence
  Non-cyclic GFR-binding peptide
VKAVKVSRLETPVSSAKPIK

SEQ ID NO: 982 - protein, 20 aa, Artificial Sequence
  Non-cyclic GFR-binding peptide
VKAVKVSRMKEPVSSPEPIG

SEQ ID NO: 983 - protein, 20 aa, Artificial Sequence
  Non-cyclic GFR-binding peptide
VKAVKVSRLKTPASSPKPVY

SEQ ID NO: 984 - protein, 20 aa, Artificial Sequence
  Non-cyclic GFR-binding peptide
VKAVKVSRLKTPASSAKPVA

SEQ ID NO: 985 - protein, 20 aa, Artificial Sequence
  Non-cyclic GFR-binding peptide
VKAVKVSRLKTPVSSAKGVK

SEQ ID NO: 986 - protein, 20 aa, Artificial Sequence
  Non-cyclic GFR-binding peptide
VKAVKVSRLKTPVSSAKSAK

SEQ ID NO: 987 - protein, 20 aa, Artificial Sequence
  Non-cyclic GFR-binding peptide
VKAVKVSRMKTPTSSPGASG

SEQ ID NO: 988 - protein, 20 aa, Artificial Sequence
  Non-cyclic GFR-binding peptide
VKAVKVSRLRAPVSSSAPAA

SEQ ID NO: 989 - protein, 20 aa, Artificial Sequence
  Non-cyclic GFR-binding peptide
VKAVKVSRLRTPVSSTPPTS

SEQ ID NO: 990 - protein, 20 aa, Artificial Sequence
  Non-cyclic GFR-binding peptide
VKAVKVSRLKTPASSPKPVH

SEQ ID NO: 991 - protein, 20 aa, Artificial Sequence
  Non-cyclic GFR-binding peptide
VKAVKVSRTKVPASSTSPVR

SEQ ID NO: 992 - protein, 20 aa, Artificial Sequence
  Non-cyclic GFR-binding peptide
VKAVKVSRLDQSVSSPSASA

SEQ ID NO: 993 - protein, 20 aa, Artificial Sequence
  Non-cyclic GFR-binding peptide
VKAVKVSRQGTPVSELGEDN

SEQ ID NO: 994 - protein, 20 aa, Artificial Sequence
  Non-cyclic GFR-binding peptide
VKAVKVSRLQVQTPRSQVNR

SEQ ID NO: 995 - protein, 20 aa, Artificial Sequence
  Non-cyclic GFR-binding peptide
IKRVQVPRHHVQTPQSKVSS

SEQ ID NO: 996 - protein, 20 aa, Artificial Sequence
  Non-cyclic GFR-binding peptide
IKRVQVPRLETPVSSAKPIK

SEQ ID NO: 997 - protein, 20 aa, Artificial Sequence
  Non-cyclic GFR-binding peptide
IKRVQVPRMKEPVSSPEPIG

SEQ ID NO: 998 - protein, 20 aa, Artificial Sequence
  Non-cyclic GFR-binding peptide
IKRVQVPRLETPVSSAKPIS

SEQ ID NO: 999 - protein, 20 aa, Artificial Sequence
  Non-cyclic GFR-binding peptide
IKRVQVPRLKTPASTPKTVH

SEQ ID NO: 1000 - protein, 20 aa, Artificial Sequence
  Non-cyclic GFR-binding peptide
IKRVQVPRLKTPASSPKPVY

SEQ ID NO: 1001 - protein, 20 aa, Artificial Sequence
  Non-cyclic GFR-binding peptide
IKRVQVPRLQTPASSPKPVT

SEQ ID NO: 1002 - protein, 20 aa, Artificial Sequence
  Non-cyclic GFR-binding peptide
IKRVQVPRLKTPASSAKPVA

SEQ ID NO: 1003 - protein, 20 aa, Artificial Sequence
  Non-cyclic GFR-binding peptide
IKRVQVPRLKTPVSSAKGVK

SEQ ID NO: 1004 - protein, 20 aa, Artificial Sequence
  Non-cyclic GFR-binding peptide
IKRVQVPRLKTPVSSAKSAK

SEQ ID NO: 1005 - protein, 20 aa, Artificial Sequence
  Non-cyclic GFR-binding peptide
IKRVQVPRMKTPTSSPGASG

SEQ ID NO: 1006 - protein, 20 aa, Artificial Sequence
  Non-cyclic GFR-binding peptide
IKRVQVPRLRAPVSSSAPAA

SEQ ID NO: 1007 - protein, 20 aa, Artificial Sequence
  Non-cyclic GFR-binding peptide
IKRVQVPRLRTPVSSTPPTS

SEQ ID NO: 1008 - protein, 20 aa, Artificial Sequence
  Non-cyclic GFR-binding peptide
IKRVQVPRLKTPASSPKPVH

SEQ ID NO: 1009 - protein, 20 aa, Artificial Sequence
  Non-cyclic GFR-binding peptide
IKRVQVPRTKVPASSTSPVR

SEQ ID NO: 1010 - protein, 20 aa, Artificial Sequence
  Non-cyclic GFR-binding peptide
IKRVQVPRLDQSVSSPSASA

SEQ ID NO: 1011 - protein, 20 aa, Artificial Sequence
  Non-cyclic GFR-binding peptide
IKRVQVPRQGTPVSELGEDN

SEQ ID NO: 1012 - protein, 20 aa, Artificial Sequence
  Non-cyclic GFR-binding peptide
IKRVQVPRHHVRSPQSKVSS

SEQ ID NO: 1013 - protein, 8 aa, Artificial Sequence
  Non-cyclic GFR-binding peptide
LYLISIAS

SEQ ID NO: 1014 - protein, 8 aa, Artificial Sequence
  Non-cyclic GFR-binding peptide
LYLVSIAS

SEQ ID NO: 1015 - protein, 8 aa, Artificial Sequence
  Non-cyclic GFR-binding peptide
FFLMSLSS

SEQ ID NO: 1016 - protein, 8 aa, Artificial Sequence
  Non-cyclic GFR-binding peptide
FFLVSLSS

SEQ ID NO: 1017 - protein, 8 aa, Artificial Sequence
  Non-cyclic GFR-binding peptide
FYLMSIAN

SEQ ID NO: 1018 - protein, 8 aa, Artificial Sequence
  Non-cyclic GFR-binding peptide
FYLISIAN

SEQ ID NO: 1019 - protein, 8 aa, Artificial Sequence
  Non-cyclic GFR-binding peptide
YYLMSTAS

SEQ ID NO: 1020 - protein, 8 aa, Artificial Sequence
  Non-cyclic GFR-binding peptide
YYLISTAS

SEQ ID NO: 1021 - protein, 8 aa, Artificial Sequence
  Non-cyclic GFR-binding peptide
KYLMSIPS

SEQ ID NO: 1022 - protein, 8 aa, Artificial Sequence
  Non-cyclic GFR-binding peptide
KYLISIPS

SEQ ID NO: 1023 - protein, 8 aa, Artificial Sequence
  Non-cyclic GFR-binding peptide
LYLMSIPE

SEQ ID NO: 1024 - protein, 8 aa, Artificial Sequence
  Non-cyclic GFR-binding peptide
LYLVSIPE

SEQ ID NO: 1025 - protein, 8 aa, Artificial Sequence
  Non-cyclic GFR-binding peptide
FYLINIPS

SEQ ID NO: 1026 - protein, 8 aa, Artificial Sequence
  Non-cyclic GFR-binding peptide
FYLVNIPS

SEQ ID NO: 1027 - protein, 8 aa, Artificial Sequence
  Non-cyclic GFR-binding peptide
IYLMSIPS

SEQ ID NO: 1028 - protein, 8 aa, Artificial Sequence
  Non-cyclic GFR-binding peptide
IYLVSIPS

SEQ ID NO: 1029 - protein, 8 aa, Artificial Sequence
  Non-cyclic GFR-binding peptide
IFLMSIPS

SEQ ID NO: 1030 - protein, 8 aa, Artificial Sequence
  Non-cyclic GFR-binding peptide
IFLVSIPS

SEQ ID NO: 1031 - protein, 8 aa, Artificial Sequence
  Non-cyclic GFR-binding peptide
VYLISLPK

SEQ ID NO: 1032 - protein, 8 aa, Artificial Sequence
  Non-cyclic GFR-binding peptide
VYLVSLPK

SEQ ID NO: 1033 - protein, 8 aa, Artificial Sequence
  Non-cyclic GFR-binding peptide
YYVMPLPE

SEQ ID NO: 1034 - protein, 8 aa, Artificial Sequence
  Non-cyclic GFR-binding peptide
YYVVPLPE

SEQ ID NO: 1035 - protein, 8 aa, Artificial Sequence
  Non-cyclic GFR-binding peptide
YYLMTLPE

SEQ ID NO: 1036 - protein, 8 aa, Artificial Sequence
  Non-cyclic GFR-binding peptide
YYLVTLPE

SEQ ID NO: 1037 - protein, 8 aa, Artificial Sequence
  Non-cyclic GFR-binding peptide
MIQITINS

SEQ ID NO: 1038 - protein, 8 aa, Artificial Sequence
  Non-cyclic GFR-binding peptide
MIQVTINS

SEQ ID NO: 1039 - protein, 8 aa, Artificial Sequence
  Non-cyclic GFR-binding peptide
VKAMKVSR

SEQ ID NO: 1040 - protein, 8 aa, Artificial Sequence
  Non-cyclic GFR-binding peptide
VKAIKVSR

SEQ ID NO: 1041 - protein, 8 aa, Artificial Sequence
  Non-cyclic GFR-binding peptide
IKRMQVPR

SEQ ID NO: 1042 - protein, 8 aa, Artificial Sequence
  Non-cyclic GFR-binding peptide
IKRIQVPR

SEQ ID NO: 1043 - protein, 20 aa, Artificial Sequence
  Non-cyclic GFR-binding peptide
KIPKASSVPTELSAISMLYL

SEQ ID NO: 1044 - protein, 20 aa, Artificial Sequence
  Non-cyclic GFR-binding peptide
GIPEPSSVPEKMSSLSILFF

SEQ ID NO: 1045 - protein, 20 aa, Artificial Sequence
  Non-cyclic GFR-binding peptide
SIPKASSVPTELSAISMLYL

SEQ ID NO: 1046 - protein, 20 aa, Artificial Sequence
  Non-cyclic GFR-binding peptide
HVTKPTSAPTKLNAISVLYF

SEQ ID NO: 1047 - protein, 20 aa, Artificial Sequence
  Non-cyclic GFR-binding peptide
YVPKPSSAPTKLNAISVLYF

SEQ ID NO: 1048 - protein, 20 aa, Artificial Sequence
  Non-cyclic GFR-binding peptide
TVPKPSSAPTQLNAISVLYF

SEQ ID NO: 1049 - protein, 20 aa, Artificial Sequence
  Non-cyclic GFR-binding peptide
AVPKASSAPTKLSATSVLYY

SEQ ID NO: 1050 - protein, 20 aa, Artificial Sequence
  Non-cyclic GFR-binding peptide
KVGKASSVPTKLSPISVLYK

SEQ ID NO: 1051 - protein, 20 aa, Artificial Sequence
  Non-cyclic GFR-binding peptide
KASKASSVPTKLEPISILYL

SEQ ID NO: 1052 - protein, 20 aa, Artificial Sequence
  Non-cyclic GFR-binding peptide
GSAGPSSTPTKMSPINMLYF

SEQ ID NO: 1053 - protein, 20 aa, Artificial Sequence
  Non-cyclic GFR-binding peptide
STPPTSSVPTRLSPISILFI

SEQ ID NO: 1054 - protein, 20 aa, Artificial Sequence
  Non-cyclic GFR-binding peptide
HVPKPSSAPTKLNAISVLYF

SEQ ID NO: 1055 - protein, 20 aa, Artificial Sequence
  Non-cyclic GFR-binding peptide
RVPSTSSAPVKTKPLSMLYV

SEQ ID NO: 1056 - protein, 20 aa, Artificial Sequence
  Non-cyclic GFR-binding peptide
ASASPSSVSQDLEPLTILYY

SEQ ID NO: 1057 - protein, 20 aa, Artificial Sequence
  Non-cyclic GFR-binding peptide
SSVKSQPSRVHHRSVKVAKV

SEQ ID NO: 1058 - protein, 20 aa, Artificial Sequence
  Non-cyclic GFR-binding peptide
RNVQSRPTQVQLRPVQVRKI

SEQ ID NO: 1059 - protein, 20 aa, Artificial Sequence
  Non-cyclic GFR-binding peptide
LYLMSIASLETPVSSAKPIK

SEQ ID NO: 1060 - protein, 20 aa, Artificial Sequence
  Non-cyclic GFR-binding peptide
FFLISLSSMKEPVSSPEPIG

SEQ ID NO: 1061 - protein, 20 aa, Artificial Sequence
  Non-cyclic GFR-binding peptide
LYLMSIASLETPVSSAKPIS

SEQ ID NO: 1062 - protein, 20 aa, Artificial Sequence
  Non-cyclic GFR-binding peptide
FYLVSIANLKTPASTPKTVH

SEQ ID NO: 1063 - protein, 20 aa, Artificial Sequence
  Non-cyclic GFR-binding peptide
FYLVSIANLQTPASSPKPVT

SEQ ID NO: 1064 - protein, 20 aa, Artificial Sequence
  Non-cyclic GFR-binding peptide
YYLVSTASLKTPASSAKPVA

SEQ ID NO: 1065 - protein, 20 aa, Artificial Sequence
  Non-cyclic GFR-binding peptide
KYLVSIPSLKTPVSSAKGVK

SEQ ID NO: 1066 - protein, 20 aa, Artificial Sequence
  Non-cyclic GFR-binding peptide
LYLISIPELKTPVSSAKSAK

SEQ ID NO: 1067 - protein, 20 aa, Artificial Sequence
  Non-cyclic GFR-binding peptide
FYLMNIPSMKTPTSSPGASG

SEQ ID NO: 1068 - protein, 20 aa, Artificial Sequence
  Non-cyclic GFR-binding peptide
IFLISIPSLRTPVSSTPPTS

SEQ ID NO: 1069 - protein, 20 aa, Artificial Sequence
  Non-cyclic GFR-binding peptide
FYLVSIANLKTPASSPKPVH

SEQ ID NO: 1070 - protein, 20 aa, Artificial Sequence
  Non-cyclic GFR-binding peptide
VYLMSLPKTKVPASSTSPVR

SEQ ID NO: 1071 - protein, 20 aa, Artificial Sequence
  Non-cyclic GFR-binding peptide
VKAVKVSRHHVRSPQSKVSS

SEQ ID NO: 1072 - protein, 20 aa, Artificial Sequence
  Non-cyclic GFR-binding peptide
IKRVQVPRLQVQTPRSQVNR

SEQ ID NO: 1073 - protein, 18 aa, Artificial Sequence
  Non-cyclic GFR-binding peptide
  MOD_RES (14)..(15): Xaa is C or S
KYLMSIPSLETPVXXAKP

SEQ ID NO: 1074 - protein, 13 aa, Artificial Sequence
  Non-cyclic GFR-binding peptide
LYLVSIASLQTPA

SEQ ID NO: 1075 - protein, 10 aa, Artificial Sequence
  Non-cyclic GFR-binding peptide
YYLISTASLA

SEQ ID NO: 1076 - protein, 10 aa, Artificial Sequence
  Non-cyclic GFR-binding peptide
KYLMSIPSLE

SEQ ID NO: 1077 - protein, 18 aa, Artificial Sequence
  Non-cyclic GFR-binding peptide
  MOD_RES (14)..(15): Xaa is C or S
KYLISIPSLDQSVXXPSA

SEQ ID NO: 1078 - protein, 19 aa, Artificial Sequence
  Non-cyclic GFR-binding peptide
  MOD_RES (14)..(15): Xaa is C or S
YYLISTASLDQSVXXPSAS

SEQ ID NO: 1079 - protein, 19 aa, Artificial Sequence
  Non-cyclic GFR-binding peptide
  MOD_RES (14)..(15): Xaa is C or S
LYLISIASLDQSVXXPSAS

SEQ ID NO: 1080 - protein, 11 aa, Artificial Sequence
  Non-cyclic GFR-binding peptide
FYLISIANLDQ

SEQ ID NO: 1081 - protein, 13 aa, Artificial Sequence
  Non-cyclic GFR-binding peptide
LYLISIASLAQPV

SEQ ID NO: 1082 - protein, 10 aa, Artificial Sequence
  Non-cyclic GFR-binding peptide
LYLISIASLA

SEQ ID NO: 1083 - protein, 16 aa, Artificial Sequence
  Non-cyclic GFR-binding peptide
  MOD_RES (14)..(15): Xaa is C or S
YYLVSTASLQTPAXXP

SEQ ID NO: 1084 - protein, 16 aa, Artificial Sequence
  Non-cyclic GFR-binding peptide
  MOD_RES (14)..(15): Xaa is C or S
YYLISTASLAQPVXXP

SEQ ID NO: 1085 - protein, 12 aa, Artificial Sequence
  Non-cyclic GFR-binding peptide
KYLISIPSLAQP

SEQ ID NO: 1086 - protein, 13 aa, Artificial Sequence
  Non-cyclic GFR-binding peptide
YYLISTASLDQSV

SEQ ID NO: 1087 - protein, 10 aa, Artificial Sequence
  Non-cyclic GFR-binding peptide
FYLMSIANLE

SEQ ID NO: 1088 - protein, 18 aa, Artificial Sequence
  Non-cyclic GFR-binding peptide
  MOD_RES (14)..(15): Xaa is C or S
YYLISTASLDQPVXXPSA

SEQ ID NO: 1089 - protein, 18 aa, Artificial Sequence
  Non-cyclic GFR-binding peptide
  MOD_RES (14)..(15): Xaa is C or S
YYLISTASLAQPVXXPAA

SEQ ID NO: 1090 - protein, 20 aa, Artificial Sequence
  Non-cyclic GFR-binding peptide
  MOD_RES (14)..(15): Xaa is C or S
YYLVSTASLQTPAXXPKPVT

SEQ ID NO: 1091 - protein, 12 aa, Artificial Sequence
  Non-cyclic GFR-binding peptide
LYLISIASLDQS

SEQ ID NO: 1092 - protein, 18 aa, Artificial Sequence
  Non-cyclic GFR-binding peptide
  MOD_RES (14)..(15): Xaa is C or S
FYLVSIANLKTPAXXAKP

SEQ ID NO: 1093 - protein, 17 aa, Artificial Sequence
  Non-cyclic GFR-binding peptide
  MOD_RES (16)..(16): Xaa is C or S
KYLVSIPSLQVQTPRXQ

SEQ ID NO: 1094 - protein, 20 aa, Artificial Sequence
  Non-cyclic GFR-binding peptide
  MOD_RES (16)..(16): Xaa is C or S
YYLVSTASLQVQTPRXQVNR

SEQ ID NO: 1095 - protein, 18 aa, Artificial Sequence
  Non-cyclic GFR-binding peptide
  MOD_RES (16)..(16): Xaa is C or S
LYLVSIASLQVQTPRXQV

SEQ ID NO: 1096 - protein, 16 aa, Artificial Sequence
  Non-cyclic GFR-binding peptide
  MOD_RES (14)..(15): Xaa is C or S
LYLISIASLAQPVXXP

SEQ ID NO: 1097 - protein, 12 aa, Artificial Sequence
  Non-cyclic GFR-binding peptide
KYLVSIPSLQTP

SEQ ID NO: 1098 - protein, 16 aa, Artificial Sequence
  Non-cyclic GFR-binding peptide
  MOD_RES (14)..(15): Xaa is C or S
LYLVSIASLQTPAXXP

SEQ ID NO: 1099 - protein, 17 aa, Artificial Sequence
  Non-cyclic GFR-binding peptide
  MOD_RES (16)..(16): Xaa is C or S
LYLVSIASLQVQTPRXQ

SEQ ID NO: 1100 - protein, 19 aa, Artificial Sequence
  Non-cyclic GFR-binding peptide
  MOD_RES (14)..(15): Xaa is C or S
YYLVSTASLQTPAXXPKPV

SEQ ID NO: 1101 - protein, 13 aa, Artificial Sequence
  Non-cyclic GFR-binding peptide
LYLISIASLDQSV

SEQ ID NO: 1102 - protein, 14 aa, Artificial Sequence
  Non-cyclic GFR-binding peptide
FYLVSIANLQVQTP

SEQ ID NO: 1103 - protein, 17 aa, Artificial Sequence
  Non-cyclic GFR-binding peptide
  MOD_RES (14)..(15): Xaa is C or S
FYLISIANLDQPVXXPS

SEQ ID NO: 1104 - protein, 16 aa, Artificial Sequence
  Non-cyclic GFR-binding peptide
  MOD_RES (14)..(15): Xaa is C or S
LYLVSIASLKTPAXXA

SEQ ID NO: 1105 - protein, 20 aa, Artificial Sequence
  Non-cyclic GFR-binding peptide
  MOD_RES (14)..(15): Xaa is C or S
FYLVSIANLKTPAXXAKPVA

SEQ ID NO: 1106 - protein, 18 aa, Artificial Sequence
  Non-cyclic GFR-binding peptide
  MOD_RES (14)..(15): Xaa is C or S
LYLISIASLDQPVXXPSA

SEQ ID NO: 1107 - protein, 15 aa, Artificial Sequence
  Non-cyclic GFR-binding peptide
  MOD_RES (14)..(15): Xaa is C or S
LYLISIASLAQPVXX

SEQ ID NO: 1108 - protein, 18 aa, Artificial Sequence
  Non-cyclic GFR-binding peptide
  MOD_RES (14)..(15): Xaa is C or S
LYLVSIASLKTPVXXAKG

SEQ ID NO: 1109 - protein, 11 aa, Artificial Sequence
  Non-cyclic GFR-binding peptide
KYLISIPSLDQ

SEQ ID NO: 1110 - protein, 18 aa, Artificial Sequence
  Non-cyclic GFR-binding peptide
  MOD_RES (16)..(16): Xaa is C or S
YYLVSTASLQVQTPRXQV

SEQ ID NO: 1111 - protein, 9 aa, Artificial Sequence
  Non-cyclic GFR-binding peptide
YYLMSTASL

SEQ ID NO: 1112 - protein, 18 aa, Artificial Sequence
  Non-cyclic GFR-binding peptide
  MOD_RES (14)..(15): Xaa is C or S
FYLMSIANLETPVXXAKP

SEQ ID NO: 1113 - protein, 13 aa, Artificial Sequence
  Non-cyclic GFR-binding peptide
YYLISTASLAQPV

SEQ ID NO: 1114 - protein, 15 aa, Artificial Sequence
  Non-cyclic GFR-binding peptide
  MOD_RES (14)..(14): Xaa is C or S
YYLVSTASLKTPAXT

SEQ ID NO: 1115 - protein, 11 aa, Artificial Sequence
  Non-cyclic GFR-binding peptide
KYLMSIPSLET

SEQ ID NO: 1116 - protein, 17 aa, Artificial Sequence
  Non-cyclic GFR-binding peptide
  MOD_RES (16)..(16): Xaa is C or S
YYLVSTASLQVQTPRXQ

SEQ ID NO: 1117 - protein, 17 aa, Artificial Sequence
  Non-cyclic GFR-binding peptide
  MOD_RES (14)..(15): Xaa is C or S
KYLISIPSLAQPVXXPA

SEQ ID NO: 1118 - protein, 18 aa, Artificial Sequence
  Non-cyclic GFR-binding peptide
  MOD_RES (14)..(15): Xaa is C or S
FYLVSIANLKTPVXXAKG

SEQ ID NO: 1119 - protein, 20 aa, Artificial Sequence
  Non-cyclic GFR-binding peptide
  MOD_RES (14)..(15): Xaa is C or S
YYLMSTASLETPVXXAKPIS

SEQ ID NO: 1120 - protein, 15 aa, Artificial Sequence
  Non-cyclic GFR-binding peptide
  MOD_RES (14)..(15): Xaa is C or S
YYLISTASLAQPVXX

SEQ ID NO: 1121 - protein, 17 aa, Artificial Sequence
  Non-cyclic GFR-binding peptide
  MOD_RES (14)..(15): Xaa is C or S
FYLMSIANLETPVXXAK

SEQ ID NO: 1122 - protein, 17 aa, Artificial Sequence
  Non-cyclic GFR-binding peptide
  MOD_RES (14)..(15): Xaa is C or S
FYLISIANLAQPVXXPA

SEQ ID NO: 1123 - protein, 18 aa, Artificial Sequence
  Non-cyclic GFR-binding peptide
  MOD_RES (14)..(15): Xaa is C or S
LYLISIASLAQPVXXPAA

SEQ ID NO: 1124 - protein, 20 aa, Artificial Sequence
  Non-cyclic GFR-binding peptide
  MOD_RES (14)..(15): Xaa is C or S
LYLVSIASLQTPAXXPKPVT

SEQ ID NO: 1125 - protein, 19 aa, Artificial Sequence
  Non-cyclic GFR-binding peptide
  MOD_RES (14)..(15): Xaa is C or S
LYLVSIASLQTPAXXPKPV

SEQ ID NO: 1126 - protein, 11 aa, Artificial Sequence
  Non-cyclic GFR-binding peptide
FYLMSIANLET

SEQ ID NO: 1127 - protein, 17 aa, Artificial Sequence
  Non-cyclic GFR-binding peptide
  MOD_RES (14)..(15): Xaa is C or S
KYLMSIPSLETPVXXAK

SEQ ID NO: 1128 - protein, 12 aa, Artificial Sequence
  Non-cyclic GFR-binding peptide
YYLISTASLDQS

SEQ ID NO: 1129 - protein, 14 aa, Artificial Sequence
  Non-cyclic GFR-binding peptide
  MOD_RES (14)..(14): Xaa is C or S
LYLISIASLAQPVX

SEQ ID NO: 1130 - protein, 20 aa, Artificial Sequence
  Non-cyclic GFR-binding peptide
  MOD_RES (14)..(14): Xaa is C or S
LYLVSIASLKTPAXTPKTVH

SEQ ID NO: 1131 - protein, 20 aa, Artificial Sequence
  Non-cyclic GFR-binding peptide
  MOD_RES (14)..(15): Xaa is C or S
KYLVSIPSLQTPAXXPKPVT

SEQ ID NO: 1132 - protein, 18 aa, Artificial Sequence
  Non-cyclic GFR-binding peptide
  MOD_RES (14)..(15): Xaa is C or S
KYLISIPSLDQPVXXPSA

SEQ ID NO: 1133 - protein, 13 aa, Artificial Sequence
  Non-cyclic GFR-binding peptide
LYLVSIASLKTPA

SEQ ID NO: 1134 - protein, 19 aa, Artificial Sequence
  Non-cyclic GFR-binding peptide
  MOD_RES (14)..(15): Xaa is C or S
YYLISTASLAQPVXXPAAS

SEQ ID NO: 1135 - protein, 17 aa, Artificial Sequence
  Non-cyclic GFR-binding peptide
  MOD_RES (14)..(15): Xaa is C or S
FYLVSIANLKTPAXXAK

SEQ ID NO: 1136 - protein, 17 aa, Artificial Sequence
  Non-cyclic GFR-binding peptide
  MOD_RES (14)..(15): Xaa is C or S
KYLISIPSLDQPVXXPS

SEQ ID NO: 1137 - protein, 19 aa, Artificial Sequence
  Non-cyclic GFR-binding peptide
  MOD_RES (14)..(15): Xaa is C or S
YYLISTASLDQPVXXPSAS

SEQ ID NO: 1138 - protein, 16 aa, Artificial Sequence
  Non-cyclic GFR-binding peptide
  MOD_RES (16)..(16): Xaa is C or S
LYLVSIASLQVQTPRX

SEQ ID NO: 1139 - protein, 19 aa, Artificial Sequence
  Non-cyclic GFR-binding peptide
  MOD_RES (14)..(15): Xaa is C or S
LYLVSIASLKTPAXXAKPV

SEQ ID NO: 1140 - protein, 20 aa, Artificial Sequence
  Non-cyclic GFR-binding peptide
  MOD_RES (14)..(15): Xaa is C or S
KYLVSIPSLKTPAXXAKPVA

SEQ ID NO: 1141 - protein, 16 aa, Artificial Sequence
  Non-cyclic GFR-binding peptide
  MOD_RES (14)..(15): Xaa is C or S
KYLISIPSLAQPVXXP

SEQ ID NO: 1142 - protein, 20 aa, Artificial Sequence
  Non-cyclic GFR-binding peptide
  MOD_RES (16)..(16): Xaa is C or S
FYLVSIANLQVQTPRXQVNR

SEQ ID NO: 1143 - protein, 16 aa, Artificial Sequence
  Non-cyclic GFR-binding peptide
  MOD_RES (14)..(15): Xaa is C or S
YYLVSTASLKTPAXXP

SEQ ID NO: 1144 - protein, 19 aa, Artificial Sequence
  Non-cyclic GFR-binding peptide
  MOD_RES (14)..(15): Xaa is C or S
LYLISIASLDQPVXXPSAS

SEQ ID NO: 1145 - protein, 17 aa, Artificial Sequence
  Non-cyclic GFR-binding peptide
  MOD_RES (14)..(15): Xaa is C or S
FYLVSIANLKTPVXXAK

SEQ ID NO: 1146 - protein, 15 aa, Artificial Sequence
  Non-cyclic GFR-binding peptide
FYLVSIANLQVQTPR

SEQ ID NO: 1147 - protein, 19 aa, Artificial Sequence
  Non-cyclic GFR-binding peptide
  MOD_RES (14)..(15): Xaa is C or S
KYLISIPSLDQSVXXPSAS

SEQ ID NO: 1148 - protein, 17 aa, Artificial Sequence
  Non-cyclic GFR-binding peptide
  MOD_RES (14)..(14): Xaa is C or S
LYLVSIASLKTPAXTPK

SEQ ID NO: 1149 - protein, 15 aa, Artificial Sequence
  Non-cyclic GFR-binding peptide
  MOD_RES (14)..(15): Xaa is C or S
FYLISIANLDQPVXX

SEQ ID NO: 1150 - protein, 14 aa, Artificial Sequence
  Non-cyclic GFR-binding peptide
  MOD_RES (14)..(14): Xaa is C or S
KYLMSIPSLETPVX

SEQ ID NO: 1151 - protein, 17 aa, Artificial Sequence
  Non-cyclic GFR-binding peptide
  MOD_RES (14)..(15): Xaa is C or S
YYLISTASLDQSVXXPS

SEQ ID NO: 1152 - protein, 11 aa, Artificial Sequence
  Non-cyclic GFR-binding peptide
LYLVSIASLKT

SEQ ID NO: 1153 - protein, 11 aa, Artificial Sequence
  Non-cyclic GFR-binding peptide
YYLISTASLAQ

SEQ ID NO: 1154 - protein, 11 aa, Artificial Sequence
  Non-cyclic GFR-binding peptide
YYLISTASLDQ

SEQ ID NO: 1155 - protein, 12 aa, Artificial Sequence
  Non-cyclic GFR-binding peptide
YYLMSTASLETP

SEQ ID NO: 1156 - protein, 20 aa, Artificial Sequence
  Non-cyclic GFR-binding peptide
  MOD_RES (14)..(15): Xaa is C or S
FYLMSIANLETPVXXAKPIK

SEQ ID NO: 1157 - protein, 18 aa, Artificial Sequence
  Non-cyclic GFR-binding peptide
  MOD_RES (16)..(16): Xaa is C or S
FYLVSIANLQVQTPRXQV

SEQ ID NO: 1158 - protein, 17 aa, Artificial Sequence
  Non-cyclic GFR-binding peptide
  MOD_RES (14)..(15): Xaa is C or S
LYLVSIASLKTPAXXPK

SEQ ID NO: 1159 - protein, 12 aa, Artificial Sequence
  Non-cyclic GFR-binding peptide
FYLISIANLDQS

SEQ ID NO: 1160 - protein, 18 aa, Artificial Sequence
  Non-cyclic GFR-binding peptide
  MOD_RES (14)..(15): Xaa is C or S
LYLVSIASLKTPAXXAKP

SEQ ID NO: 1161 - protein, 11 aa, Artificial Sequence
  Non-cyclic GFR-binding peptide
FYLVSIANLQV

SEQ ID NO: 1162 - protein, 10 aa, Artificial Sequence
  Non-cyclic GFR-binding peptide
FYLISIANLA

SEQ ID NO: 1163 - protein, 15 aa, Artificial Sequence
  Non-cyclic GFR-binding peptide
  MOD_RES (14)..(15): Xaa is C or S
FYLISIANLAQPVXX

SEQ ID NO: 1164 - protein, 13 aa, Artificial Sequence
  Non-cyclic GFR-binding peptide
LYLISIASLDQPV

SEQ ID NO: 1165 - protein, 13 aa, Artificial Sequence
  Non-cyclic GFR-binding peptide
FYLISIANLAQPV

SEQ ID NO: 1166 - protein, 12 aa, Artificial Sequence
  Non-cyclic GFR-binding peptide
KYLMSIPSLETP

SEQ ID NO: 1167 - protein, 14 aa, Artificial Sequence
  Non-cyclic GFR-binding peptide
  MOD_RES (14)..(14): Xaa is C or S
YYLMSTASLETPVX

SEQ ID NO: 1168 - protein, 14 aa, Artificial Sequence
  Non-cyclic GFR-binding peptide
  MOD_RES (14)..(14): Xaa is C or S
LYLISIASLDQPVX

SEQ ID NO: 1169 - protein, 9 aa, Artificial Sequence
  Non-cyclic GFR-binding peptide
KYLMSIPSL

SEQ ID NO: 1170 - protein, 15 aa, Artificial Sequence
  Non-cyclic GFR-binding peptide
  MOD_RES (14)..(14): Xaa is C or S
KYLVSIPSLKTPAXT

SEQ ID NO: 1171 - protein, 18 aa, Artificial Sequence
  Non-cyclic GFR-binding peptide
  MOD_RES (14)..(15): Xaa is C or S
LYLVSIASLKTPAXXPKP

SEQ ID NO: 1172 - protein, 16 aa, Artificial Sequence
  Non-cyclic GFR-binding peptide
  MOD_RES (14)..(15): Xaa is C or S
YYLISTASLDQPVXXP

SEQ ID NO: 1173 - protein, 14 aa, Artificial Sequence
  Non-cyclic GFR-binding peptide
  MOD_RES (14)..(14): Xaa is C or S
FYLISIANLDQSVX

SEQ ID NO: 1174 - protein, 18 aa, Artificial Sequence
  Non-cyclic GFR-binding peptide
  MOD_RES (14)..(15): Xaa is C or S
YYLVSTASLKTPVXXAKG

SEQ ID NO: 1175 - protein, 15 aa, Artificial Sequence
  Non-cyclic GFR-binding peptide
  MOD_RES (14)..(15): Xaa is C or S
KYLMSIPSLETPVXX

SEQ ID NO: 1176 - protein, 16 aa, Artificial Sequence
  Non-cyclic GFR-binding peptide
  MOD_RES (14)..(15): Xaa is C or S
YYLISTASLDQSVXXP

SEQ ID NO: 1177 - protein, 14 aa, Artificial Sequence
  Non-cyclic GFR-binding peptide
  MOD_RES (14)..(14): Xaa is C or S
FYLISIANLDQPVX

SEQ ID NO: 1178 - protein, 13 aa, Artificial Sequence
  Non-cyclic GFR-binding peptide
FYLISIANLDQPV

SEQ ID NO: 1179 - protein, 20 aa, Artificial Sequence
  Non-cyclic GFR-binding peptide
  MOD_RES (14)..(15): Xaa is C or S
KYLISIPSLDQPVXXPSASA

SEQ ID NO: 1180 - protein, 15 aa, Artificial Sequence
  Non-cyclic GFR-binding peptide
  MOD_RES (14)..(15): Xaa is C or S
YYLISTASLDQSVXX

SEQ ID NO: 1181 - protein, 15 aa, Artificial Sequence
  Non-cyclic GFR-binding peptide
  MOD_RES (14)..(15): Xaa is C or S
LYLVSIASLKTPAXX

SEQ ID NO: 1182 - protein, 19 aa, Artificial Sequence
  Non-cyclic GFR-binding peptide
  MOD_RES (14)..(15): Xaa is C or S
FYLVSIANLKTPVXXAKGV

SEQ ID NO: 1183 - protein, 16 aa, Artificial Sequence
  Non-cyclic GFR-binding peptide
  MOD_RES (14)..(15): Xaa is C or S
FYLVSIANLKTPVXXA

SEQ ID NO: 1184 - protein, 9 aa, Artificial Sequence
  Non-cyclic GFR-binding peptide
LYLISIASL

SEQ ID NO: 1185 - protein, 16 aa, Artificial Sequence
  Non-cyclic GFR-binding peptide
  MOD_RES (14)..(15): Xaa is C or S
KYLISIPSLDQSVXXP

SEQ ID NO: 1186 - protein, 10 aa, Artificial Sequence
  Non-cyclic GFR-binding peptide
FYLISIANLD

SEQ ID NO: 1187 - protein, 15 aa, Artificial Sequence
  Non-cyclic GFR-binding peptide
  MOD_RES (14)..(15): Xaa is C or S
LYLVSIASLQTPAXX

SEQ ID NO: 1188 - protein, 18 aa, Artificial Sequence
  Non-cyclic GFR-binding peptide
  MOD_RES (14)..(15): Xaa is C or S
LYLVSIASLQTPAXXPKP

SEQ ID NO: 1189 - protein, 20 aa, Artificial Sequence
  Non-cyclic GFR-binding peptide
  MOD_RES (14)..(15): Xaa is C or S
FYLISIANLAQPVXXPAASA

SEQ ID NO: 1190 - protein, 19 aa, Artificial Sequence
  Non-cyclic GFR-binding peptide
  MOD_RES (14)..(14): Xaa is C or S
LYLVSIASLKTPAXTPKTV

SEQ ID NO: 1191 - protein, 13 aa, Artificial Sequence
  Non-cyclic GFR-binding peptide
LYLVSIASLQVQT

SEQ ID NO: 1192 - protein, 20 aa, Artificial Sequence
  Non-cyclic GFR-binding peptide
  MOD_RES (14)..(15): Xaa is C or S
LYLISIASLAQPVXXPAASA

SEQ ID NO: 1193 - protein, 13 aa, Artificial Sequence
  Non-cyclic GFR-binding peptide
FYLVSIANLQVQT

SEQ ID NO: 1194 - protein, 18 aa, Artificial Sequence
  Non-cyclic GFR-binding peptide
  MOD_RES (14)..(15): Xaa is C or S
FYLISIANLDQSVXXPSA

SEQ ID NO: 1195 - protein, 12 aa, Artificial Sequence
  Non-cyclic GFR-binding peptide
LYLISIASLAQP

SEQ ID NO: 1196 - protein, 20 aa, Artificial Sequence
  Non-cyclic GFR-binding peptide
  MOD_RES (14)..(15): Xaa is C or S
YYLVSTASLKTPAXXPKPVY

SEQ ID NO: 1197 - protein, 16 aa, Artificial Sequence
  Non-cyclic GFR-binding peptide
  MOD_RES (14)..(15): Xaa is C or S
LYLVSIASLKTPVXXA

SEQ ID NO: 1198 - protein, 12 aa, Artificial Sequence
  Non-cyclic GFR-binding peptide
FYLISIANLAQP

SEQ ID NO: 1199 - protein, 12 aa, Artificial Sequence
  Non-cyclic GFR-binding peptide
LYLISIASLDQP

SEQ ID NO: 1200 - protein, 19 aa, Artificial Sequence
  Non-cyclic GFR-binding peptide
  MOD_RES (16)..(16): Xaa is C or S
FYLVSIANLQVQTPRXQVN

SEQ ID NO: 1201 - protein, 12 aa, Artificial Sequence
  Non-cyclic GFR-binding peptide
YYLVSTASLQTP

SEQ ID NO: 1202 - protein, 10 aa, Artificial Sequence
  Non-cyclic GFR-binding peptide
YYLMSTASLE

SEQ ID NO: 1203 - protein, 18 aa, Artificial Sequence
  Non-cyclic GFR-binding peptide
  MOD_RES (14)..(14): Xaa is C or S
LYLVSIASLKTPAXTPKT

SEQ ID NO: 1204 - protein, 19 aa, Artificial Sequence
  Non-cyclic GFR-binding peptide
  MOD_RES (14)..(15): Xaa is C or S
YYLMSTASLETPVXXAKPI

SEQ ID NO: 1205 - protein, 20 aa, Artificial Sequence
  Non-cyclic GFR-binding peptide
  MOD_RES (16)..(16): Xaa is C or S
LYLVSIASLQVQTPRXQVNR

SEQ ID NO: 1206 - protein, 15 aa, Artificial Sequence
  Non-cyclic GFR-binding peptide
LYLVSIASLQVQTPR

SEQ ID NO: 1207 - protein, 17 aa, Artificial Sequence
  Non-cyclic GFR-binding peptide
  MOD_RES (14)..(15): Xaa is C or S
LYLVSIASLQTPAXXPK

SEQ ID NO: 1208 - protein, 18 aa, Artificial Sequence
  Non-cyclic GFR-binding peptide
  MOD_RES (14)..(15): Xaa is C or S
LYLISIASLDQSVXXPSA

SEQ ID NO: 1209 - protein, 9 aa, Artificial Sequence
  Non-cyclic GFR-binding peptide
FYLISIANL

SEQ ID NO: 1210 - protein, 17 aa, Artificial Sequence
  Non-cyclic GFR-binding peptide
  MOD_RES (14)..(15): Xaa is C or S
YYLVSTASLKTPVXXAK

SEQ ID NO: 1211 - protein, 17 aa, Artificial Sequence
  Non-cyclic GFR-binding peptide
  MOD_RES (14)..(15): Xaa is C or S
KYLISIPSLDQSVXXPS

SEQ ID NO: 1212 - protein, 14 aa, Artificial Sequence
  Non-cyclic GFR-binding peptide
  MOD_RES (14)..(14): Xaa is C or S
FYLISIANLAQPVX

SEQ ID NO: 1213 - protein, 17 aa, Artificial Sequence
  Non-cyclic GFR-binding peptide
  MOD_RES (14)..(15): Xaa is C or S
LYLVSIASLKTPAXXAK

SEQ ID NO: 1214 - protein, 10 aa, Artificial Sequence
  Non-cyclic GFR-binding peptide
LYLVSIASLQ

SEQ ID NO: 1215 - protein, 15 aa, Artificial Sequence
  Non-cyclic GFR-binding peptide
  MOD_RES (14)..(15): Xaa is C or S
KYLVSIPSLKTPAXX

SEQ ID NO: 1216 - protein, 11 aa, Artificial Sequence
  Non-cyclic GFR-binding peptide
LYLVSIASLQV

SEQ ID NO: 1217 - protein, 12 aa, Artificial Sequence
  Non-cyclic GFR-binding peptide
LYLVSIASLQVQ

SEQ ID NO: 1218 - protein, 16 aa, Artificial Sequence
  Non-cyclic GFR-binding peptide
  MOD_RES (14)..(15): Xaa is C or S
KYLVSIPSLKTPAXXP

SEQ ID NO: 1219 - protein, 19 aa, Artificial Sequence
  Non-cyclic GFR-binding peptide
  MOD_RES (14)..(15): Xaa is C or S
KYLISIPSLAQPVXXPAAS

SEQ ID NO: 1220 - protein, 19 aa, Artificial Sequence
  Non-cyclic GFR-binding peptide
  MOD_RES (14)..(15): Xaa is C or S
FYLISIANLAQPVXXPAAS

SEQ ID NO: 1221 - protein, 19 aa, Artificial Sequence
  Non-cyclic GFR-binding peptide
  MOD_RES (14)..(15): Xaa is C or S
KYLMSIPSLETPVXXAKPI

SEQ ID NO: 1222 - protein, 13 aa, Artificial Sequence
  Non-cyclic GFR-binding peptide
KYLISIPSLDQPV

SEQ ID NO: 1223 - protein, 10 aa, Artificial Sequence
  Non-cyclic GFR-binding peptide
YYLVSTASLQ

SEQ ID NO: 1224 - protein, 19 aa, Artificial Sequence
  Non-cyclic GFR-binding peptide
  MOD_RES (16)..(16): Xaa is C or S
YYLVSTASLQVQTPRXQVN

SEQ ID NO: 1225 - protein, 14 aa, Artificial Sequence
  Non-cyclic GFR-binding peptide
  MOD_RES (14)..(14): Xaa is C or S
KYLVSIPSLQTPAX

SEQ ID NO: 1226 - protein, 12 aa, Artificial Sequence
  Non-cyclic GFR-binding peptide
FYLMSIANLETP

SEQ ID NO: 1227 - protein, 12 aa, Artificial Sequence
  Non-cyclic GFR-binding peptide
YYLVSTASLQVQ

SEQ ID NO: 1228 - protein, 17 aa, Artificial Sequence
  Non-cyclic GFR-binding peptide
  MOD_RES (14)..(15): Xaa is C or S
YYLISTASLDQPVXXPS

SEQ ID NO: 1229 - protein, 16 aa, Artificial Sequence
  Non-cyclic GFR-binding peptide
  MOD_RES (14)..(15): Xaa is C or S
KYLMSIPSLETPVXXA

SEQ ID NO: 1230 - protein, 19 aa, Artificial Sequence
  Non-cyclic GFR-binding peptide
  MOD_RES (16)..(16): Xaa is C or S
LYLVSIASLQVQTPRXQVN

SEQ ID NO: 1231 - protein, 15 aa, Artificial Sequence
  Non-cyclic GFR-binding peptide
YYLVSTASLQVQTPR

SEQ ID NO: 1232 - protein, 14 aa, Artificial Sequence
  Non-cyclic GFR-binding peptide
YYLVSTASLQVQTP

SEQ ID NO: 1233 - protein, 9 aa, Artificial Sequence
  Non-cyclic GFR-binding peptide
YYLISTASL

SEQ ID NO: 1234 - protein, 17 aa, Artificial Sequence
  Non-cyclic GFR-binding peptide
  MOD_RES (14)..(15): Xaa is C or S
YYLMSTASLETPVXXAK

SEQ ID NO: 1235 - protein, 18 aa, Artificial Sequence
  Non-cyclic GFR-binding peptide
  MOD_RES (14)..(14): Xaa is C or S
YYLVSTASLKTPAXTPKT

SEQ ID NO: 1236 - protein, 13 aa, Artificial Sequence
  Non-cyclic GFR-binding peptide
KYLMSIPSLETPV

SEQ ID NO: 1237 - protein, 16 aa, Artificial Sequence
  Non-cyclic GFR-binding peptide
  MOD_RES (16)..(16): Xaa is C or S
KYLVSIPSLQVQTPRX

SEQ ID NO: 1238 - protein, 13 aa, Artificial Sequence
  Non-cyclic GFR-binding peptide
FYLVSIANLKTPV

SEQ ID NO: 1239 - protein, 14 aa, Artificial Sequence
  Non-cyclic GFR-binding peptide
  MOD_RES (14)..(14): Xaa is C or S
KYLISIPSLDQSVX

SEQ ID NO: 1240 - protein, 19 aa, Artificial Sequence
  Non-cyclic GFR-binding peptide
  MOD_RES (14)..(15): Xaa is C or S
FYLVSIANLKTPAXXAKPV

SEQ ID NO: 1241 - protein, 12 aa, Artificial Sequence
  Non-cyclic GFR-binding peptide
FYLISIANLDQP

SEQ ID NO: 1242 - protein, 14 aa, Artificial Sequence
  Non-cyclic GFR-binding peptide
  MOD_RES (14)..(14): Xaa is C or S
LYLVSIASLKTPAX

SEQ ID NO: 1243 - protein, 16 aa, Artificial Sequence
  Non-cyclic GFR-binding peptide
  MOD_RES (16)..(16): Xaa is C or S
FYLVSIANLQVQTPRX

SEQ ID NO: 1244 - protein, 17 aa, Artificial Sequence
  Non-cyclic GFR-binding peptide
  MOD_RES (14)..(15): Xaa is C or S
LYLISIASLDQPVXXPS

SEQ ID NO: 1245 - protein, 19 aa, Artificial Sequence
  Non-cyclic GFR-binding peptide
  MOD_RES (14)..(15): Xaa is C or S
LYLVSIASLKTPAXXPKPV

SEQ ID NO: 1246 - protein, 19 aa, Artificial Sequence
  Non-cyclic GFR-binding peptide
  MOD_RES (14)..(15): Xaa is C or S
FYLMSIANLETPVXXAKPI

SEQ ID NO: 1247 - protein, 14 aa, Artificial Sequence
  Non-cyclic GFR-binding peptide
  MOD_RES (14)..(14): Xaa is C or S
YYLVSTASLKTPVX

SEQ ID NO: 1248 - protein, 20 aa, Artificial Sequence
  Non-cyclic GFR-binding peptide
  MOD_RES (14)..(15): Xaa is C or S
KYLMSIPSLETPVXXAKPIS

SEQ ID NO: 1249 - protein, 19 aa, Artificial Sequence
  Non-cyclic GFR-binding peptide
  MOD_RES (14)..(15): Xaa is C or S
FYLISIANLDQPVXXPSAS

SEQ ID NO: 1250 - protein, 19 aa, Artificial Sequence
  Non-cyclic GFR-binding peptide
  MOD_RES (14)..(15): Xaa is C or S
LYLVSIASLKTPVXXAKGV

SEQ ID NO: 1251 - protein, 20 aa, Artificial Sequence
  Non-cyclic GFR-binding peptide
  MOD_RES (14)..(15): Xaa is C or S
FYLMSIANLETPVXXAKPIS

SEQ ID NO: 1252 - protein, 19 aa, Artificial Sequence
  Non-cyclic GFR-binding peptide
  MOD_RES (14)..(15): Xaa is C or S
KYLVSIPSLKTPAXXAKPV

SEQ ID NO: 1253 - protein, 16 aa, Artificial Sequence
  Non-cyclic GFR-binding peptide
  MOD_RES (14)..(15): Xaa is C or S
FYLMSIANLETPVXXA

SEQ ID NO: 1254 - protein, 17 aa, Artificial Sequence
  Non-cyclic GFR-binding peptide
  MOD_RES (14)..(15): Xaa is C or S
YYLISTASLAQPVXXPA

SEQ ID NO: 1255 - protein, 15 aa, Artificial Sequence
  Non-cyclic GFR-binding peptide
  MOD_RES (14)..(15): Xaa is C or S
LYLISIASLDQPVXX

SEQ ID NO: 1256 - protein, 10 aa, Artificial Sequence
  Non-cyclic GFR-binding peptide
LYLISIASLD

SEQ ID NO: 1257 - protein, 17 aa, Artificial Sequence
  Non-cyclic GFR-binding peptide
  MOD_RES (14)..(15): Xaa is C or S
LYLVSIASLKTPVXXAK

SEQ ID NO: 1258 - protein, 19 aa, Artificial Sequence
  Non-cyclic GFR-binding peptide
  MOD_RES (14)..(15): Xaa is C or S
KYLISIPSLDQPVXXPSAS

SEQ ID NO: 1259 - protein, 9 aa, Artificial Sequence
  Non-cyclic GFR-binding peptide
FYLMSIANL

SEQ ID NO: 1260 - protein, 20 aa, Artificial Sequence
  Non-cyclic GFR-binding peptide
  MOD_RES (14)..(15): Xaa is C or S
LYLVSIASLKTPAXXAKPVA

SEQ ID NO: 1261 - protein, 20 aa, Artificial Sequence
  Non-cyclic GFR-binding peptide
  MOD_RES (14)..(15): Xaa is C or S
KYLVSIPSLKTPAXXPKPVY

SEQ ID NO: 1262 - protein, 10 aa, Artificial Sequence
  Non-cyclic GFR-binding peptide
YYLISTASLD

SEQ ID NO: 1263 - protein, 16 aa, Artificial Sequence
  Non-cyclic GFR-binding peptide
  MOD_RES (14)..(15): Xaa is C or S
FYLVSIANLKTPAXXA

SEQ ID NO: 1264 - protein, 16 aa, Artificial Sequence
  Non-cyclic GFR-binding peptide
  MOD_RES (14)..(14): Xaa is C or S
YYLVSTASLKTPAXTP

SEQ ID NO: 1265 - protein, 11 aa, Artificial Sequence
  Non-cyclic GFR-binding peptide
YYLVSTASLQT

SEQ ID NO: 1266 - protein, 17 aa, Artificial Sequence
  Non-cyclic GFR-binding peptide
  MOD_RES (14)..(15): Xaa is C or S
LYLISIASLAQPVXXPA

SEQ ID NO: 1267 - protein, 15 aa, Artificial Sequence
  Non-cyclic GFR-binding peptide
  MOD_RES (14)..(15): Xaa is C or S
LYLVSIASLKTPVXX

SEQ ID NO: 1268 - protein, 16 aa, Artificial Sequence
  Non-cyclic GFR-binding peptide
  MOD_RES (14)..(14): Xaa is C or S
LYLVSIASLKTPAXTP

SEQ ID NO: 1269 - protein, 14 aa, Artificial Sequence
  Non-cyclic GFR-binding peptide
  MOD_RES (14)..(14): Xaa is C or S
LYLISIASLDQSVX

SEQ ID NO: 1270 - protein, 15 aa, Artificial Sequence
  Non-cyclic GFR-binding peptide
  MOD_RES (14)..(15): Xaa is C or S
FYLVSIANLKTPVXX

SEQ ID NO: 1271 - protein, 19 aa, Artificial Sequence
  Non-cyclic GFR-binding peptide
  MOD_RES (14)..(15): Xaa is C or S
YYLVSTASLKTPVXXAKGV

SEQ ID NO: 1272 - protein, 9 aa, Artificial Sequence
  Non-cyclic GFR-binding peptide
LYLVSIASL

SEQ ID NO: 1273 - protein, 11 aa, Artificial Sequence
  Non-cyclic GFR-binding peptide
KYLVSIPSLQV

SEQ ID NO: 1274 - protein, 11 aa, Artificial Sequence
  Non-cyclic GFR-binding peptide
LYLISIASLAQ

SEQ ID NO: 1275 - protein, 11 aa, Artificial Sequence
  Non-cyclic GFR-binding peptide
KYLVSIPSLQT

SEQ ID NO: 1276 - protein, 16 aa, Artificial Sequence
  Non-cyclic GFR-binding peptide
  MOD_RES (14)..(15): Xaa is C or S
LYLISIASLDQPVXXP

SEQ ID NO: 1277 - protein, 20 aa, Artificial Sequence
  Non-cyclic GFR-binding peptide
  MOD_RES (14)..(15): Xaa is C or S
YYLISTASLDQPVXXPSASA

SEQ ID NO: 1278 - protein, 17 aa, Artificial Sequence
  Non-cyclic GFR-binding peptide
  MOD_RES (14)..(15): Xaa is C or S
YYLVSTASLKTPAXXPK

SEQ ID NO: 1279 - protein, 15 aa, Artificial Sequence
  Non-cyclic GFR-binding peptide
  MOD_RES (14)..(15): Xaa is C or S
YYLVSTASLKTPVXX

SEQ ID NO: 1280 - protein, 19 aa, Artificial Sequence
  Non-cyclic GFR-binding peptide
  MOD_RES (14)..(15): Xaa is C or S
KYLVSIPSLQTPAXXPKPV

SEQ ID NO: 1281 - protein, 20 aa, Artificial Sequence
  Non-cyclic GFR-binding peptide
  MOD_RES (14)..(15): Xaa is C or S
LYLVSIASLKTPVXXAKGVK

SEQ ID NO: 1282 - protein, 20 aa, Artificial Sequence
  Non-cyclic GFR-binding peptide
  MOD_RES (14)..(15): Xaa is C or S
LYLISIASLDQSVXXPSASA

SEQ ID NO: 1283 - protein, 18 aa, Artificial Sequence
  Non-cyclic GFR-binding peptide
  MOD_RES (14)..(15): Xaa is C or S
FYLISIANLAQPVXXPAA

SEQ ID NO: 1284 - protein, 16 aa, Artificial Sequence
  Non-cyclic GFR-binding peptide
  MOD_RES (14)..(15): Xaa is C or S
KYLVSIPSLKTPAXXA

SEQ ID NO: 1285 - protein, 16 aa, Artificial Sequence
  Non-cyclic GFR-binding peptide
  MOD_RES (14)..(14): Xaa is C or S
KYLVSIPSLKTPAXTP

SEQ ID NO: 1286 - protein, 15 aa, Artificial Sequence
  Non-cyclic GFR-binding peptide
  MOD_RES (14)..(15): Xaa is C or S
FYLISIANLDQSVXX

SEQ ID NO: 1287 - protein, 19 aa, Artificial Sequence
  Non-cyclic GFR-binding peptide
  MOD_RES (14)..(15): Xaa is C or S
KYLVSIPSLKTPAXXPKPV

SEQ ID NO: 1288 - protein, 15 aa, Artificial Sequence
  Non-cyclic GFR-binding peptide
  MOD_RES (14)..(15): Xaa is C or S
YYLISTASLDQPVXX

SEQ ID NO: 1289 - protein, 16 aa, Artificial Sequence
  Non-cyclic GFR-binding peptide
  MOD_RES (14)..(15): Xaa is C or S
LYLVSIASLKTPAXXP

SEQ ID NO: 1290 - protein, 13 aa, Artificial Sequence
  Non-cyclic GFR-binding peptide
LYLVSIASLKTPV

SEQ ID NO: 1291 - protein, 13 aa, Artificial Sequence
  Non-cyclic GFR-binding peptide
YYLISTASLDQPV

SEQ ID NO: 1292 - protein, 12 aa, Artificial Sequence
  Non-cyclic GFR-binding peptide
KYLVSIPSLQVQ

SEQ ID NO: 1293 - protein, 20 aa, Artificial Sequence
  Non-cyclic GFR-binding peptide
  MOD_RES (14)..(15): Xaa is C or S
YYLVSTASLKTPVXXAKGVK

SEQ ID NO: 1294 - protein, 11 aa, Artificial Sequence
  Non-cyclic GFR-binding peptide
FYLISIANLAQ

SEQ ID NO: 1295 - protein, 20 aa, Artificial Sequence
  Non-cyclic GFR-binding peptide
  MOD_RES (14)..(15): Xaa is C or S
FYLISIANLDQSVXXPSASA

SEQ ID NO: 1296 - protein, 14 aa, Artificial Sequence
  Non-cyclic GFR-binding peptide
LYLVSIASLQVQTP

SEQ ID NO: 1297 - protein, 10 aa, Artificial Sequence
  Non-cyclic GFR-binding peptide
KYLVSIPSLQ

SEQ ID NO: 1298 - protein, 11 aa, Artificial Sequence
  Non-cyclic GFR-binding peptide
LYLVSIASLQT

SEQ ID NO: 1299 - protein, 14 aa, Artificial Sequence
  Non-cyclic GFR-binding peptide
  MOD_RES (14)..(14): Xaa is C or S
LYLVSIASLQTPAX

SEQ ID NO: 1300 - protein, 13 aa, Artificial Sequence
  Non-cyclic GFR-binding peptide
FYLISIANLDQSV

SEQ ID NO: 1301 - protein, 11 aa, Artificial Sequence
  Non-cyclic GFR-binding peptide
LYLISIASLDQ

SEQ ID NO: 1302 - protein, 16 aa, Artificial Sequence
  Non-cyclic GFR-binding peptide
  MOD_RES (14)..(15): Xaa is C or S
KYLISIPSLDQPVXXP

SEQ ID NO: 1303 - protein, 15 aa, Artificial Sequence
  Non-cyclic GFR-binding peptide
  MOD_RES (14)..(15): Xaa is C or S
KYLISIPSLDQSVXX

SEQ ID NO: 1304 - protein, 18 aa, Artificial Sequence
  Non-cyclic GFR-binding peptide
  MOD_RES (14)..(15): Xaa is C or S
FYLISIANLDQPVXXPSA

SEQ ID NO: 1305 - protein, 11 aa, Artificial Sequence
  Non-cyclic GFR-binding peptide
KYLISIPSLAQ

SEQ ID NO: 1306 - protein, 20 aa, Artificial Sequence
  Non-cyclic GFR-binding peptide
  MOD_RES (14)..(15): Xaa is C or S
KYLISIPSLDQSVXXPSASA

SEQ ID NO: 1307 - protein, 15 aa, Artificial Sequence
  Non-cyclic GFR-binding peptide
  MOD_RES (14)..(15): Xaa is C or S
YYLMSTASLETPVXX

SEQ ID NO: 1308 - protein, 17 aa, Artificial Sequence
  Non-cyclic GFR-binding peptide
  MOD_RES (14)..(14): Xaa is C or S
KYLVSIPSLKTPAXTPK

SEQ ID NO: 1309 - protein, 14 aa, Artificial Sequence
  Non-cyclic GFR-binding peptide
  MOD_RES (14)..(14): Xaa is C or S
YYLISTASLDQSVX

SEQ ID NO: 1310 - protein, 16 aa, Artificial Sequence
  Non-cyclic GFR-binding peptide
  MOD_RES (14)..(15): Xaa is C or S
FYLISIANLDQPVXXP

SEQ ID NO: 1311 - protein, 13 aa, Artificial Sequence
  Non-cyclic GFR-binding peptide
KYLISIPSLDQSV

SEQ ID NO: 1312 - protein, 13 aa, Artificial Sequence
  Non-cyclic GFR-binding peptide
YYLMSTASLETPV

SEQ ID NO: 1313 - protein, 14 aa, Artificial Sequence
  Non-cyclic GFR-binding peptide
  MOD_RES (14)..(14): Xaa is C or S
YYLVSTASLQTPAX

SEQ ID NO: 1314 - protein, 9 aa, Artificial Sequence
  Non-cyclic GFR-binding peptide
KYLISIPSL

SEQ ID NO: 1315 - protein, 16 aa, Artificial Sequence
  Non-cyclic GFR-binding peptide
  MOD_RES (16)..(16): Xaa is C or S
YYLVSTASLQVQTPRX

SEQ ID NO: 1316 - protein, 15 aa, Artificial Sequence
  Non-cyclic GFR-binding peptide
  MOD_RES (14)..(15): Xaa is C or S
KYLISIPSLAQPVXX

SEQ ID NO: 1317 - protein, 16 aa, Artificial Sequence
  Non-cyclic GFR-binding peptide
  MOD_RES (14)..(15): Xaa is C or S
KYLVSIPSLQTPAXXP

SEQ ID NO: 1318 - protein, 12 aa, Artificial Sequence
  Non-cyclic GFR-binding peptide
FYLVSIANLQVQ

SEQ ID NO: 1319 - protein, 16 aa, Artificial Sequence
  Non-cyclic GFR-binding peptide
  MOD_RES (14)..(15): Xaa is C or S
YYLMSTASLETPVXXA

SEQ ID NO: 1320 - protein, 19 aa, Artificial Sequence
  Non-cyclic GFR-binding peptide
  MOD_RES (14)..(15): Xaa is C or S
FYLISIANLDQSVXXPSAS

SEQ ID NO: 1321 - protein, 17 aa, Artificial Sequence
  Non-cyclic GFR-binding peptide
  MOD_RES (14)..(14): Xaa is C or S
YYLVSTASLKTPAXTPK

SEQ ID NO: 1322 - protein, 18 aa, Artificial Sequence
  Non-cyclic GFR-binding peptide
  MOD_RES (14)..(15): Xaa is C or S
KYLISIPSLAQPVXXPAA

SEQ ID NO: 1323 - protein, 20 aa, Artificial Sequence
  Non-cyclic GFR-binding peptide
  MOD_RES (14)..(14): Xaa is C or S
YYLVSTASLKTPAXTPKTVH

SEQ ID NO: 1324 - protein, 14 aa, Artificial Sequence
  Non-cyclic GFR-binding peptide
KYLVSIPSLQVQTP

SEQ ID NO: 1325 - protein, 13 aa, Artificial Sequence
  Non-cyclic GFR-binding peptide
YYLVSTASLKTPV

SEQ ID NO: 1326 - protein, 20 aa, Artificial Sequence
  Non-cyclic GFR-binding peptide
  MOD_RES (14)..(15): Xaa is C or S
LYLVSIASLKTPAXXPKPVY

SEQ ID NO: 1327 - protein, 16 aa, Artificial Sequence
  Non-cyclic GFR-binding peptide
  MOD_RES (14)..(15): Xaa is C or S
FYLISIANLAQPVXXP

SEQ ID NO: 1328 - protein, 10 aa, Artificial Sequence
  Non-cyclic GFR-binding peptide
LYLVSIASLK

SEQ ID NO: 1329 - protein, 14 aa, Artificial Sequence
  Non-cyclic GFR-binding peptide
  MOD_RES (14)..(14): Xaa is C or S
KYLVSIPSLKTPAX

SEQ ID NO: 1330 - protein, 15 aa, Artificial Sequence
  Non-cyclic GFR-binding peptide
  MOD_RES (14)..(15): Xaa is C or S
LYLISIASLDQSVXX

SEQ ID NO: 1331 - protein, 18 aa, Artificial Sequence
  Non-cyclic GFR-binding peptide
  MOD_RES (14)..(15): Xaa is C or S
KYLVSIPSLQTPAXXPKP

SEQ ID NO: 1332 - protein, 20 aa, Artificial Sequence
  Non-cyclic GFR-binding peptide
  MOD_RES (14)..(15): Xaa is C or S
FYLVSIANLKTPVXXAKGVK

SEQ ID NO: 1333 - protein, 13 aa, Artificial Sequence
  Non-cyclic GFR-binding peptide
KYLVSIPSLQTPA

SEQ ID NO: 1334 - protein, 18 aa, Artificial Sequence
  Non-cyclic GFR-binding peptide
  MOD_RES (14)..(15): Xaa is C or S
YYLISTASLDQSVXXPSA

SEQ ID NO: 1335 - protein, 10 aa, Artificial Sequence
  Non-cyclic GFR-binding peptide
KYLISIPSLA

SEQ ID NO: 1336 - protein, 18 aa, Artificial Sequence
  Non-cyclic GFR-binding peptide
  MOD_RES (14)..(15): Xaa is C or S
YYLMSTASLETPVXXAKP

SEQ ID NO: 1337 - protein, 17 aa, Artificial Sequence
  Non-cyclic GFR-binding peptide
  MOD_RES (14)..(15): Xaa is C or S
KYLVSIPSLKTPAXXAK

SEQ ID NO: 1338 - protein, 12 aa, Artificial Sequence
  Non-cyclic GFR-binding peptide
YYLISTASLAQP

SEQ ID NO: 1339 - protein, 14 aa, Artificial Sequence
  Non-cyclic GFR-binding peptide
  MOD_RES (14)..(14): Xaa is C or S
YYLISTASLAQPVX

SEQ ID NO: 1340 - protein, 12 aa, Artificial Sequence
  Non-cyclic GFR-binding peptide
KYLISIPSLDQP

SEQ ID NO: 1341 - protein, 13 aa, Artificial Sequence
  Non-cyclic GFR-binding peptide
KYLISIPSLAQPV

SEQ ID NO: 1342 - protein, 13 aa, Artificial Sequence
  Non-cyclic GFR-binding peptide
YYLVSTASLQVQT

SEQ ID NO: 1343 - protein, 20 aa, Artificial Sequence
  Non-cyclic GFR-binding peptide
  MOD_RES (14)..(15): Xaa is C or S
YYLISTASLAQPVXXPAASA

SEQ ID NO: 1344 - protein, 15 aa, Artificial Sequence
  Non-cyclic GFR-binding peptide
  MOD_RES (14)..(15): Xaa is C or S
KYLVSIPSLQTPAXX

SEQ ID NO: 1345 - protein, 11 aa, Artificial Sequence
  Non-cyclic GFR-binding peptide
YYLMSTASLET

SEQ ID NO: 1346 - protein, 19 aa, Artificial Sequence
  Non-cyclic GFR-binding peptide
  MOD_RES (14)..(15): Xaa is C or S
LYLISIASLAQPVXXPAAS

SEQ ID NO: 1347 - protein, 15 aa, Artificial Sequence
  Non-cyclic GFR-binding peptide
  MOD_RES (14)..(15): Xaa is C or S
FYLMSIANLETPVXX

SEQ ID NO: 1348 - protein, 18 aa, Artificial Sequence
  Non-cyclic GFR-binding peptide
  MOD_RES (14)..(15): Xaa is C or S
YYLVSTASLKTPAXXPKP

SEQ ID NO: 1349 - protein, 14 aa, Artificial Sequence
  Non-cyclic GFR-binding peptide
  MOD_RES (14)..(14): Xaa is C or S
KYLISIPSLDQPVX

SEQ ID NO: 1350 - protein, 20 aa, Artificial Sequence
  Non-cyclic GFR-binding peptide
  MOD_RES (14)..(15): Xaa is C or S
LYLISIASLDQPVXXPSASA

SEQ ID NO: 1351 - protein, 19 aa, Artificial Sequence
  Non-cyclic GFR-binding peptide
  MOD_RES (14)..(14): Xaa is C or S
KYLVSIPSLKTPAXTPKTV

SEQ ID NO: 1352 - protein, 15 aa, Artificial Sequence
  Non-cyclic GFR-binding peptide
  MOD_RES (14)..(14): Xaa is C or S
LYLVSIASLKTPAXT

SEQ ID NO: 1353 - protein, 18 aa, Artificial Sequence
  Non-cyclic GFR-binding peptide
  MOD_RES (14)..(15): Xaa is C or S
KYLVSIPSLKTPAXXAKP

SEQ ID NO: 1354 - protein, 12 aa, Artificial Sequence
  Non-cyclic GFR-binding peptide
LYLVSIASLKTP

SEQ ID NO: 1355 - protein, 15 aa, Artificial Sequence
  Non-cyclic GFR-binding peptide
  MOD_RES (14)..(15): Xaa is C or S
KYLISIPSLDQPVXX

SEQ ID NO: 1356 - protein, 15 aa, Artificial Sequence
  Non-cyclic GFR-binding peptide
KYLVSIPSLQVQTPR

SEQ ID NO: 1357 - protein, 17 aa, Artificial Sequence
  Non-cyclic GFR-binding peptide
  MOD_RES (16)..(16): Xaa is C or S
FYLVSIANLQVQTPRXQ

SEQ ID NO: 1358 - protein, 13 aa, Artificial Sequence
  Non-cyclic GFR-binding peptide
FYLMSIANLETPV

SEQ ID NO: 1359 - protein, 19 aa, Artificial Sequence
  Non-cyclic GFR-binding peptide
  MOD_RES (14)..(15): Xaa is C or S
YYLVSTASLKTPAXXPKPV

SEQ ID NO: 1360 - protein, 20 aa, Artificial Sequence
  Non-cyclic GFR-binding peptide
  MOD_RES (14)..(15): Xaa is C or S
KYLISIPSLAQPVXXPAASA

SEQ ID NO: 1361 - protein, 18 aa, Artificial Sequence
  Non-cyclic GFR-binding peptide
  MOD_RES (14)..(15): Xaa is C or S
YYLVSTASLQTPAXXPKP

SEQ ID NO: 1362 - protein, 20 aa, Artificial Sequence
  Non-cyclic GFR-binding peptide
  MOD_RES (14)..(15): Xaa is C or S
KYLMSIPSLETPVXXAKPIK

SEQ ID NO: 1363 - protein, 17 aa, Artificial Sequence
  Non-cyclic GFR-binding peptide
  MOD_RES (14)..(15): Xaa is C or S
YYLVSTASLQTPAXXPK

SEQ ID NO: 1364 - protein, 20 aa, Artificial Sequence
  Non-cyclic GFR-binding peptide
  MOD_RES (14)..(15): Xaa is C or S
YYLISTASLDQSVXXPSASA

SEQ ID NO: 1365 - protein, 16 aa, Artificial Sequence
  Non-cyclic GFR-binding peptide
  MOD_RES (14)..(15): Xaa is C or S
YYLVSTASLKTPVXXA

SEQ ID NO: 1366 - protein, 12 aa, Artificial Sequence
  Non-cyclic GFR-binding peptide
KYLISIPSLDQS

SEQ ID NO: 1367 - protein, 20 aa, Artificial Sequence
  Non-cyclic GFR-binding peptide
  MOD_RES (14)..(15): Xaa is C or S
YYLMSTASLETPVXXAKPIK

SEQ ID NO: 1368 - protein, 17 aa, Artificial Sequence
  Non-cyclic GFR-binding peptide
  MOD_RES (14)..(15): Xaa is C or S
KYLVSIPSLKTPAXXPK

SEQ ID NO: 1369 - protein, 17 aa, Artificial Sequence
  Non-cyclic GFR-binding peptide
  MOD_RES (14)..(15): Xaa is C or S
KYLVSIPSLQTPAXXPK

SEQ ID NO: 1370 - protein, 12 aa, Artificial Sequence
  Non-cyclic GFR-binding peptide
YYLISTASLDQP

SEQ ID NO: 1371 - protein, 16 aa, Artificial Sequence
  Non-cyclic GFR-binding peptide
  MOD_RES (14)..(15): Xaa is C or S
FYLISIANLDQSVXXP

SEQ ID NO: 1372 - protein, 14 aa, Artificial Sequence
  Non-cyclic GFR-binding peptide
  MOD_RES (14)..(14): Xaa is C or S
YYLISTASLDQPVX

SEQ ID NO: 1373 - protein, 18 aa, Artificial Sequence
  Non-cyclic GFR-binding peptide
  MOD_RES (16)..(16): Xaa is C or S
KYLVSIPSLQVQTPRXQV

SEQ ID NO: 1374 - protein, 14 aa, Artificial Sequence
  Non-cyclic GFR-binding peptide
  MOD_RES (14)..(14): Xaa is C or S
KYLISIPSLAQPVX

SEQ ID NO: 1375 - protein, 14 aa, Artificial Sequence
  Non-cyclic GFR-binding peptide
  MOD_RES (14)..(14): Xaa is C or S
FYLMSIANLETPVX

SEQ ID NO: 1376 - protein, 17 aa, Artificial Sequence
  Non-cyclic GFR-binding peptide
  MOD_RES (14)..(15): Xaa is C or S
LYLISIASLDQSVXXPS

SEQ ID NO: 1377 - protein, 13 aa, Artificial Sequence
  Non-cyclic GFR-binding peptide
KYLVSIPSLQVQT

SEQ ID NO: 1378 - protein, 20 aa, Artificial Sequence
  Non-cyclic GFR-binding peptide
  MOD_RES (16)..(16): Xaa is C or S
KYLVSIPSLQVQTPRXQVNR

SEQ ID NO: 1379 - protein, 20 aa, Artificial Sequence
  Non-cyclic GFR-binding peptide
  MOD_RES (14)..(15): Xaa is C or S
FYLISIANLDQPVXXPSASA

SEQ ID NO: 1380 - protein, 12 aa, Artificial Sequence
  Non-cyclic GFR-binding peptide
LYLVSIASLQTP

SEQ ID NO: 1381 - protein, 18 aa, Artificial Sequence
  Non-cyclic GFR-binding peptide
  MOD_RES (14)..(14): Xaa is C or S
KYLVSIPSLKTPAXTPKT

SEQ ID NO: 1382 - protein, 18 aa, Artificial Sequence
  Non-cyclic GFR-binding peptide
  MOD_RES (14)..(15): Xaa is C or S
KYLVSIPSLKTPAXXPKP

SEQ ID NO: 1383 - protein, 14 aa, Artificial Sequence
  Non-cyclic GFR-binding peptide
  MOD_RES (14)..(14): Xaa is C or S
FYLVSIANLKTPVX

SEQ ID NO: 1384 - protein, 10 aa, Artificial Sequence
  Non-cyclic GFR-binding peptide
KYLISIPSLD

SEQ ID NO: 1385 - protein, 15 aa, Artificial Sequence
  Non-cyclic GFR-binding peptide
  MOD_RES (14)..(15): Xaa is C or S
YYLVSTASLQTPAXX

SEQ ID NO: 1386 - protein, 14 aa, Artificial Sequence
  Non-cyclic GFR-binding peptide
  MOD_RES (14)..(14): Xaa is C or S
LYLVSIASLKTPVX

SEQ ID NO: 1387 - protein, 20 aa, Artificial Sequence
  Non-cyclic GFR-binding peptide
  MOD_RES (14)..(14): Xaa is C or S
KYLVSIPSLKTPAXTPKTVH

SEQ ID NO: 1388 - protein, 13 aa, Artificial Sequence
  Non-cyclic GFR-binding peptide
KYLVSIPSLKTPA

SEQ ID NO: 1389 - protein, 19 aa, Artificial Sequence
  Non-cyclic GFR-binding peptide
  MOD_RES (14)..(14): Xaa is C or S
YYLVSTASLKTPAXTPKTV

SEQ ID NO: 1390 - protein, 16 aa, Artificial Sequence
  Non-cyclic GFR-binding peptide
  MOD_RES (14)..(15): Xaa is C or S
LYLISIASLDQSVXXP

SEQ ID NO: 1391 - protein, 13 aa, Artificial Sequence
  Non-cyclic GFR-binding peptide
YYLVSTASLQTPA

SEQ ID NO: 1392 - protein, 19 aa, Artificial Sequence
  Non-cyclic GFR-binding peptide
  MOD_RES (16)..(16): Xaa is C or S
KYLVSIPSLQVQTPRXQVN

SEQ ID NO: 1393 - protein, 17 aa, Artificial Sequence
  Non-cyclic GFR-binding peptide
  MOD_RES (14)..(15): Xaa is C or S
FYLISIANLDQSVXXPS

SEQ ID NO: 1394 - protein, 11 aa, Artificial Sequence
  Non-cyclic GFR-binding peptide
YYLVSTASLQV

SEQ ID NO: 1395 - protein, 18 aa, Artificial Sequence
  Non-cyclic GFR-binding peptide
  MOD_RES (4)..(5): Xaa is C or S
PKAXXVPTELSPISMLYK

SEQ ID NO: 1396 - protein, 13 aa, Artificial Sequence
  Non-cyclic GFR-binding peptide
APTQLSAISVLYL

SEQ ID NO: 1397 - protein, 10 aa, Artificial Sequence
  Non-cyclic GFR-binding peptide
ALSATSILYY

SEQ ID NO: 1398 - protein, 10 aa, Artificial Sequence
  Non-cyclic GFR-binding peptide
ELSPISMLYK

SEQ ID NO: 1399 - protein, 18 aa, Artificial Sequence
  Non-cyclic GFR-binding peptide
  MOD_RES (4)..(5): Xaa is C or S
ASPXXVSQDLSPISILYK

SEQ ID NO: 1400 - protein, 19 aa, Artificial Sequence
  Non-cyclic GFR-binding peptide
  MOD_RES (5)..(6): Xaa is C or S
SASPXXVSQDLSATSILYY

SEQ ID NO: 1401 - protein, 19 aa, Artificial Sequence
  Non-cyclic GFR-binding peptide
  MOD_RES (5)..(6): Xaa is C or S
SASPXXVSQDLSAISILYL

SEQ ID NO: 1402 - protein, 11 aa, Artificial Sequence
  Non-cyclic GFR-binding peptide
QDLNAISILYF

SEQ ID NO: 1403 - protein, 13 aa, Artificial Sequence
  Non-cyclic GFR-binding peptide
VPQALSAISILYL

SEQ ID NO: 1404 - protein, 10 aa, Artificial Sequence
  Non-cyclic GFR-binding peptide
ALSAISILYL

SEQ ID NO: 1405 - protein, 16 aa, Artificial Sequence
  Non-cyclic GFR-binding peptide
  MOD_RES (2)..(3): Xaa is C or S
PXXAPTQLSATSVLYY

SEQ ID NO: 1406 - protein, 16 aa, Artificial Sequence
  Non-cyclic GFR-binding peptide
  MOD_RES (2)..(3): Xaa is C or S
PXXVPQALSATSILYY

SEQ ID NO: 1407 - protein, 12 aa, Artificial Sequence
  Non-cyclic GFR-binding peptide
PQALSPISILYK

SEQ ID NO: 1408 - protein, 13 aa, Artificial Sequence
  Non-cyclic GFR-binding peptide
VSQDLSATSILYY

SEQ ID NO: 1409 - protein, 10 aa, Artificial Sequence
  Non-cyclic GFR-binding peptide
ELNAISMLYF

SEQ ID NO: 1410 - protein, 18 aa, Artificial Sequence
  Non-cyclic GFR-binding peptide
  MOD_RES (4)..(5): Xaa is C or S
ASPXXVPQDLSATSILYY

SEQ ID NO: 1411 - protein, 18 aa, Artificial Sequence
  Non-cyclic GFR-binding peptide
  MOD_RES (4)..(5): Xaa is C or S
AAPXXVPQALSATSILYY

SEQ ID NO: 1412 - protein, 20 aa, Artificial Sequence
  Non-cyclic GFR-binding peptide
  MOD_RES (6)..(7): Xaa is C or S
TVPKPXXAPTQLSATSVLYY

SEQ ID NO: 1413 - protein, 12 aa, Artificial Sequence
  Non-cyclic GFR-binding peptide
SQDLSAISILYL

SEQ ID NO: 1414 - protein, 18 aa, Artificial Sequence
  Non-cyclic GFR-binding peptide
  MOD_RES (4)..(5): Xaa is C or S
PKAXXAPTKLNAISVLYF

SEQ ID NO: 1415 - protein, 17 aa, Artificial Sequence
  Non-cyclic GFR-binding peptide
  MOD_RES (2)..(2): Xaa is C or S
QXRPTQVQLSPISVLYK

SEQ ID NO: 1416 - protein, 20 aa, Artificial Sequence
  Non-cyclic GFR-binding peptide
  MOD_RES (5)..(5): Xaa is C or S
RNVQXRPTQVQLSATSVLYY

SEQ ID NO: 1417 - protein, 18 aa, Artificial Sequence
  Non-cyclic GFR-binding peptide
  MOD_RES (3)..(3): Xaa is C or S
VQXRPTQVQLSAISVLYL

SEQ ID NO: 1418 - protein, 16 aa, Artificial Sequence
  Non-cyclic GFR-binding peptide
  MOD_RES (2)..(3): Xaa is C or S
PXXVPQALSAISILYL

SEQ ID NO: 1419 - protein, 12 aa, Artificial Sequence
  Non-cyclic GFR-binding peptide
PTQLSPISVLYK

SEQ ID NO: 1420 - protein, 16 aa, Artificial Sequence
  Non-cyclic GFR-binding peptide
  MOD_RES (2)..(3): Xaa is C or S
PXXAPTQLSAISVLYL

SEQ ID NO: 1421 - protein, 17 aa, Artificial Sequence
  Non-cyclic GFR-binding peptide
  MOD_RES (2)..(2): Xaa is C or S
QXRPTQVQLSAISVLYL

SEQ ID NO: 1422 - protein, 19 aa, Artificial Sequence
  Non-cyclic GFR-binding peptide
  MOD_RES (5)..(6): Xaa is C or S
VPKPXXAPTQLSATSVLYY

SEQ ID NO: 1423 - protein, 13 aa, Artificial Sequence
  Non-cyclic GFR-binding peptide
VSQDLSAISILYL

SEQ ID NO: 1424 - protein, 14 aa, Artificial Sequence
  Non-cyclic GFR-binding peptide
PTQVQLNAISVLYF

SEQ ID NO: 1425 - protein, 17 aa, Artificial Sequence
  Non-cyclic GFR-binding peptide
  MOD_RES (3)..(4): Xaa is C or S
SPXXVPQDLNAISILYF

SEQ ID NO: 1426 - protein, 16 aa, Artificial Sequence
  Non-cyclic GFR-binding peptide
  MOD_RES (2)..(3): Xaa is C or S
AXXAPTKLSAISVLYL

SEQ ID NO: 1427 - protein, 20 aa, Artificial Sequence
  Non-cyclic GFR-binding peptide
  MOD_RES (6)..(7): Xaa is C or S
AVPKAXXAPTKLNAISVLYF

SEQ ID NO: 1428 - protein, 18 aa, Artificial Sequence
  Non-cyclic GFR-binding peptide
  MOD_RES (4)..(5): Xaa is C or S
ASPXXVPQDLSAISILYL

SEQ ID NO: 1429 - protein, 15 aa, Artificial Sequence
  Non-cyclic GFR-binding peptide
  MOD_RES (1)..(2): Xaa is C or S
XXVPQALSAISILYL

SEQ ID NO: 1430 - protein, 18 aa, Artificial Sequence
  Non-cyclic GFR-binding peptide
  MOD_RES (4)..(5): Xaa is C or S
GKAXXVPTKLSAISVLYL

SEQ ID NO: 1431 - protein, 11 aa, Artificial Sequence
  Non-cyclic GFR-binding peptide
QDLSPISILYK

SEQ ID NO: 1432 - protein, 18 aa, Artificial Sequence
  Non-cyclic GFR-binding peptide
  MOD_RES (3)..(3): Xaa is C or S
VQXRPTQVQLSATSVLYY

SEQ ID NO: 1433 - protein, 9 aa, Artificial Sequence
  Non-cyclic GFR-binding peptide
LSATSMLYY

SEQ ID NO: 1434 - protein, 18 aa, Artificial Sequence
  Non-cyclic GFR-binding peptide
  MOD_RES (4)..(5): Xaa is C or S
PKAXXVPTELNAISMLYF

SEQ ID NO: 1435 - protein, 13 aa, Artificial Sequence
  Non-cyclic GFR-binding peptide
VPQALSATSILYY

SEQ ID NO: 1436 - protein, 15 aa, Artificial Sequence
  Non-cyclic GFR-binding peptide
  MOD_RES (2)..(2): Xaa is C or S
TXAPTKLSATSVLYY

SEQ ID NO: 1437 - protein, 11 aa, Artificial Sequence
  Non-cyclic GFR-binding peptide
TELSPISMLYK

SEQ ID NO: 1438 - protein, 17 aa, Artificial Sequence
  Non-cyclic GFR-binding peptide
  MOD_RES (2)..(2): Xaa is C or S
QXRPTQVQLSATSVLYY

SEQ ID NO: 1439 - protein, 17 aa, Artificial Sequence
  Non-cyclic GFR-binding peptide
  MOD_RES (3)..(4): Xaa is C or S
APXXVPQALSPISILYK

SEQ ID NO: 1440 - protein, 18 aa, Artificial Sequence
  Non-cyclic GFR-binding peptide
  MOD_RES (4)..(5): Xaa is C or S
GKAXXVPTKLNAISVLYF

SEQ ID NO: 1441 - protein, 20 aa, Artificial Sequence
  Non-cyclic GFR-binding peptide
  MOD_RES (6)..(7): Xaa is C or S
SIPKAXXVPTELSATSMLYY

SEQ ID NO: 1442 - protein, 15 aa, Artificial Sequence
  Non-cyclic GFR-binding peptide
  MOD_RES (1)..(2): Xaa is C or S
XXVPQALSATSILYY

SEQ ID NO: 1443 - protein, 17 aa, Artificial Sequence
  Non-cyclic GFR-binding peptide
  MOD_RES (3)..(4): Xaa is C or S
KAXXVPTELNAISMLYF

SEQ ID NO: 1444 - protein, 17 aa, Artificial Sequence
  Non-cyclic GFR-binding peptide
  MOD_RES (3)..(4): Xaa is C or S
APXXVPQALNAISILYF

SEQ ID NO: 1445 - protein, 18 aa, Artificial Sequence
  Non-cyclic GFR-binding peptide
  MOD_RES (4)..(5): Xaa is C or S
AAPXXVPQALSAISILYL

SEQ ID NO: 1446 - protein, 20 aa, Artificial Sequence
  Non-cyclic GFR-binding peptide
  MOD_RES (6)..(7): Xaa is C or S
TVPKPXXAPTQLSAISVLYL

SEQ ID NO: 1447 - protein, 19 aa, Artificial Sequence
  Non-cyclic GFR-binding peptide
  MOD_RES (5)..(6): Xaa is C or S
VPKPXXAPTQLSAISVLYL

SEQ ID NO: 1448 - protein, 11 aa, Artificial Sequence
  Non-cyclic GFR-binding peptide
TELNAISMLYF

SEQ ID NO: 1449 - protein, 17 aa, Artificial Sequence
  Non-cyclic GFR-binding peptide
  MOD_RES (3)..(4): Xaa is C or S
KAXXVPTELSPISMLYK

SEQ ID NO: 1450 - protein, 12 aa, Artificial Sequence
  Non-cyclic GFR-binding peptide
SQDLSATSILYY

SEQ ID NO: 1451 - protein, 14 aa, Artificial Sequence
  Non-cyclic GFR-binding peptide
  MOD_RES (1)..(1): Xaa is C or S
XVPQALSAISILYL

SEQ ID NO: 1452 - protein, 20 aa, Artificial Sequence
  Non-cyclic GFR-binding peptide
  MOD_RES (7)..(7): Xaa is C or S
HVTKPTXAPTKLSAISVLYL

SEQ ID NO: 1453 - protein, 20 aa, Artificial Sequence
  Non-cyclic GFR-binding peptide
  MOD_RES (6)..(7): Xaa is C or S
TVPKPXXAPTQLSPISVLYK

SEQ ID NO: 1454 - protein, 18 aa, Artificial Sequence
  Non-cyclic GFR-binding peptide
  MOD_RES (4)..(5): Xaa is C or S
ASPXXVPQDLSPISILYK

SEQ ID NO: 1455 - protein, 13 aa, Artificial Sequence
  Non-cyclic GFR-binding peptide
APTKLSAISVLYL

SEQ ID NO: 1456 - protein, 19 aa, Artificial Sequence
  Non-cyclic GFR-binding peptide
  MOD_RES (5)..(6): Xaa is C or S
SAAPXXVPQALSATSILYY

SEQ ID NO: 1457 - protein, 17 aa, Artificial Sequence
  Non-cyclic GFR-binding peptide
  MOD_RES (3)..(4): Xaa is C or S
KAXXAPTKLNAISVLYF

SEQ ID NO: 1458 - protein, 17 aa, Artificial Sequence
  Non-cyclic GFR-binding peptide
  MOD_RES (3)..(4): Xaa is C or S
SPXXVPQDLSPISILYK

SEQ ID NO: 1459 - protein, 19 aa, Artificial Sequence
  Non-cyclic GFR-binding peptide
  MOD_RES (5)..(6): Xaa is C or S
SASPXXVPQDLSATSILYY

SEQ ID NO: 1460 - protein, 16 aa, Artificial Sequence
  Non-cyclic GFR-binding peptide
  MOD_RES (1)..(1): Xaa is C or S
XRPTQVQLSAISVLYL

SEQ ID NO: 1461 - protein, 19 aa, Artificial Sequence
  Non-cyclic GFR-binding peptide
  MOD_RES (5)..(6): Xaa is C or S
VPKAXXAPTKLSAISVLYL

SEQ ID NO: 1462 - protein, 20 aa, Artificial Sequence
  Non-cyclic GFR-binding peptide
  MOD_RES (6)..(7): Xaa is C or S
AVPKAXXAPTKLSPISVLYK

SEQ ID NO: 1463 - protein, 16 aa, Artificial Sequence
  Non-cyclic GFR-binding peptide
  MOD_RES (2)..(3): Xaa is C or S
PXXVPQALSPISILYK

SEQ ID NO: 1464 - protein, 20 aa, Artificial Sequence
  Non-cyclic GFR-binding peptide
  MOD_RES (5)..(5): Xaa is C or S
RNVQXRPTQVQLNAISVLYF

SEQ ID NO: 1465 - protein, 16 aa, Artificial Sequence
  Non-cyclic GFR-binding peptide
  MOD_RES (2)..(3): Xaa is C or S
PXXAPTKLSATSVLYY

SEQ ID NO: 1466 - protein, 19 aa, Artificial Sequence
  Non-cyclic GFR-binding peptide
  MOD_RES (5)..(6): Xaa is C or S
SASPXXVPQDLSAISILYL

SEQ ID NO: 1467 - protein, 17 aa, Artificial Sequence
  Non-cyclic GFR-binding peptide
  MOD_RES (3)..(4): Xaa is C or S
KAXXVPTKLNAISVLYF

SEQ ID NO: 1468 - protein, 15 aa, Artificial Sequence
  Non-cyclic GFR-binding peptide
RPTQVQLNAISVLYF

SEQ ID NO: 1469 - protein, 19 aa, Artificial Sequence
  Non-cyclic GFR-binding peptide
  MOD_RES (5)..(6): Xaa is C or S
SASPXXVSQDLSPISILYK

SEQ ID NO: 1470 - protein, 17 aa, Artificial Sequence
  Non-cyclic GFR-binding peptide
  MOD_RES (4)..(4): Xaa is C or S
KPTXAPTKLSAISVLYL

SEQ ID NO: 1471 - protein, 15 aa, Artificial Sequence
  Non-cyclic GFR-binding peptide
  MOD_RES (1)..(2): Xaa is C or S
XXVPQDLNAISILYF

SEQ ID NO: 1472 - protein, 14 aa, Artificial Sequence
  Non-cyclic GFR-binding peptide
  MOD_RES (1)..(1): Xaa is C or S
XVPTELSPISMLYK

SEQ ID NO: 1473 - protein, 17 aa, Artificial Sequence
  Non-cyclic GFR-binding peptide
  MOD_RES (3)..(4): Xaa is C or S
SPXXVSQDLSATSILYY

SEQ ID NO: 1474 - protein, 11 aa, Artificial Sequence
  Non-cyclic GFR-binding peptide
TKLSAISVLYL

SEQ ID NO: 1475 - protein, 11 aa, Artificial Sequence
  Non-cyclic GFR-binding peptide
QALSATSILYY

SEQ ID NO: 1476 - protein, 11 aa, Artificial Sequence
  Non-cyclic GFR-binding peptide
QDLSATSILYY

SEQ ID NO: 1477 - protein, 12 aa, Artificial Sequence
  Non-cyclic GFR-binding peptide
PTELSATSMLYY

SEQ ID NO: 1478 - protein, 20 aa, Artificial Sequence
  Non-cyclic GFR-binding peptide
  MOD_RES (6)..(7): Xaa is C or S
KIPKAXXVPTELNAISMLYF

SEQ ID NO: 1479 - protein, 18 aa, Artificial Sequence
  Non-cyclic GFR-binding peptide
  MOD_RES (3)..(3): Xaa is C or S
VQXRPTQVQLNAISVLYF

SEQ ID NO: 1480 - protein, 17 aa, Artificial Sequence
  Non-cyclic GFR-binding peptide
  MOD_RES (3)..(4): Xaa is C or S
KPXXAPTKLSAISVLYL

SEQ ID NO: 1481 - protein, 12 aa, Artificial Sequence
  Non-cyclic GFR-binding peptide
SQDLNAISILYF

SEQ ID NO: 1482 - protein, 18 aa, Artificial Sequence
  Non-cyclic GFR-binding peptide
  MOD_RES (4)..(5): Xaa is C or S
PKAXXAPTKLSAISVLYL

SEQ ID NO: 1483 - protein, 11 aa, Artificial Sequence
  Non-cyclic GFR-binding peptide
VQLNAISVLYF

SEQ ID NO: 1484 - protein, 10 aa, Artificial Sequence
  Non-cyclic GFR-binding peptide
ALNAISILYF

SEQ ID NO: 1485 - protein, 15 aa, Artificial Sequence
  Non-cyclic GFR-binding peptide
  MOD_RES (1)..(2): Xaa is C or S
XXVPQALNAISILYF

SEQ ID NO: 1486 - protein, 13 aa, Artificial Sequence
  Non-cyclic GFR-binding peptide
VPQDLSAISILYL

SEQ ID NO: 1487 - protein, 13 aa, Artificial Sequence
  Non-cyclic GFR-binding peptide
VPQALNAISILYF

SEQ ID NO: 1488 - protein, 12 aa, Artificial Sequence
  Non-cyclic GFR-binding peptide
PTELSPISMLYK

SEQ ID NO: 1489 - protein, 14 aa, Artificial Sequence
  Non-cyclic GFR-binding peptide
  MOD_RES (1)..(1): Xaa is C or S
XVPTELSATSMLYY

SEQ ID NO: 1490 - protein, 14 aa, Artificial Sequence
  Non-cyclic GFR-binding peptide
  MOD_RES (1)..(1): Xaa is C or S
XVPQDLSAISILYL

SEQ ID NO: 1491 - protein, 9 aa, Artificial Sequence
  Non-cyclic GFR-binding peptide
LSPISMLYK

SEQ ID NO: 1492 - protein, 15 aa, Artificial Sequence
  Non-cyclic GFR-binding peptide
  MOD_RES (2)..(2): Xaa is C or S
TXAPTKLSPISVLYK

SEQ ID NO: 1493 - protein, 18 aa, Artificial Sequence
  Non-cyclic GFR-binding peptide
  MOD_RES (4)..(5): Xaa is C or S
PKPXXAPTKLSAISVLYL

SEQ ID NO: 1494 - protein, 16 aa, Artificial Sequence
  Non-cyclic GFR-binding peptide
  MOD_RES (2)..(3): Xaa is C or S
PXXVPQDLSATSILYY

SEQ ID NO: 1495 - protein, 14 aa, Artificial Sequence
  Non-cyclic GFR-binding peptide
  MOD_RES (1)..(1): Xaa is C or S
XVSQDLNAISILYF

SEQ ID NO: 1496 - protein, 18 aa, Artificial Sequence
  Non-cyclic GFR-binding peptide
  MOD_RES (4)..(5): Xaa is C or S
GKAXXVPTKLSATSVLYY

SEQ ID NO: 1497 - protein, 15 aa, Artificial Sequence
  Non-cyclic GFR-binding peptide
  MOD_RES (1)..(2): Xaa is C or S
XXVPTELSPISMLYK

SEQ ID NO: 1498 - protein, 16 aa, Artificial Sequence
  Non-cyclic GFR-binding peptide
  MOD_RES (2)..(3): Xaa is C or S
PXXVSQDLSATSILYY

SEQ ID NO: 1499 - protein, 14 aa, Artificial Sequence
  Non-cyclic GFR-binding peptide
  MOD_RES (1)..(1): Xaa is C or S
XVPQDLNAISILYF

SEQ ID NO: 1500 - protein, 13 aa, Artificial Sequence
  Non-cyclic GFR-binding peptide
VPQDLNAISILYF

SEQ ID NO: 1501 - protein, 20 aa, Artificial Sequence
  Non-cyclic GFR-binding peptide
  MOD_RES (6)..(7): Xaa is C or S
ASASPXXVPQDLSPISILYK

SEQ ID NO: 1502 - protein, 15 aa, Artificial Sequence
  Non-cyclic GFR-binding peptide
  MOD_RES (1)..(2): Xaa is C or S
XXVSQDLSATSILYY

SEQ ID NO: 1503 - protein, 15 aa, Artificial Sequence
  Non-cyclic GFR-binding peptide
  MOD_RES (1)..(2): Xaa is C or S
XXAPTKLSAISVLYL

SEQ ID NO: 1504 - protein, 19 aa, Artificial Sequence
  Non-cyclic GFR-binding peptide
  MOD_RES (5)..(6): Xaa is C or S
VGKAXXVPTKLNAISVLYF

SEQ ID NO: 1505 - protein, 16 aa, Artificial Sequence
  Non-cyclic GFR-binding peptide
  MOD_RES (2)..(3): Xaa is C or S
AXXVPTKLNAISVLYF

SEQ ID NO: 1506 - protein, 9 aa, Artificial Sequence
  Non-cyclic GFR-binding peptide
LSAISILYL

SEQ ID NO: 1507 - protein, 16 aa, Artificial Sequence
  Non-cyclic GFR-binding peptide
  MOD_RES (2)..(3): Xaa is C or S
PXXVSQDLSPISILYK

SEQ ID NO: 1508 - protein, 10 aa, Artificial Sequence
  Non-cyclic GFR-binding peptide
DLNAISILYF

SEQ ID NO: 1509 - protein, 15 aa, Artificial Sequence
  Non-cyclic GFR-binding peptide
  MOD_RES (1)..(2): Xaa is C or S
XXAPTQLSAISVLYL

SEQ ID NO: 1510 - protein, 18 aa, Artificial Sequence
  Non-cyclic GFR-binding peptide
  MOD_RES (4)..(5): Xaa is C or S
PKPXXAPTQLSAISVLYL

SEQ ID NO: 1511 - protein, 20 aa, Artificial Sequence
  Non-cyclic GFR-binding peptide
  MOD_RES (6)..(7): Xaa is C or S
ASAAPXXVPQALNAISILYF

SEQ ID NO: 1512 - protein, 19 aa, Artificial Sequence
  Non-cyclic GFR-binding peptide
  MOD_RES (6)..(6): Xaa is C or S
VTKPTXAPTKLSAISVLYL

SEQ ID NO: 1513 - protein, 13 aa, Artificial Sequence
  Non-cyclic GFR-binding peptide
TQVQLSAISVLYL

SEQ ID NO: 1514 - protein, 20 aa, Artificial Sequence
  Non-cyclic GFR-binding peptide
  MOD_RES (6)..(7): Xaa is C or S
ASAAPXXVPQALSAISILYL

SEQ ID NO: 1515 - protein, 13 aa, Artificial Sequence
  Non-cyclic GFR-binding peptide
TQVQLNAISVLYF

SEQ ID NO: 1516 - protein, 18 aa, Artificial Sequence
  Non-cyclic GFR-binding peptide
  MOD_RES (4)..(5): Xaa is C or S
ASPXXVSQDLNAISILYF

SEQ ID NO: 1517 - protein, 12 aa, Artificial Sequence
  Non-cyclic GFR-binding peptide
PQALSAISILYL

SEQ ID NO: 1518 - protein, 20 aa, Artificial Sequence
  Non-cyclic GFR-binding peptide
  MOD_RES (6)..(7): Xaa is C or S
YVPKPXXAPTKLSATSVLYY

SEQ ID NO: 1519 - protein, 16 aa, Artificial Sequence
  Non-cyclic GFR-binding peptide
  MOD_RES (2)..(3): Xaa is C or S
AXXVPTKLSAISVLYL

SEQ ID NO: 1520 - protein, 12 aa, Artificial Sequence
  Non-cyclic GFR-binding peptide
PQALNAISILYF

SEQ ID NO: 1521 - protein, 12 aa, Artificial Sequence
  Non-cyclic GFR-binding peptide
PQDLSAISILYL

SEQ ID NO: 1522 - protein, 19 aa, Artificial Sequence
  Non-cyclic GFR-binding peptide
  MOD_RES (4)..(4): Xaa is C or S
NVQXRPTQVQLNAISVLYF

SEQ ID NO: 1523 - protein, 12 aa, Artificial Sequence
  Non-cyclic GFR-binding peptide
PTQLSATSVLYY

SEQ ID NO: 1524 - protein, 10 aa, Artificial Sequence
  Non-cyclic GFR-binding peptide
ELSATSMLYY

SEQ ID NO: 1525 - protein, 18 aa, Artificial Sequence
  Non-cyclic GFR-binding peptide
  MOD_RES (5)..(5): Xaa is C or S
TKPTXAPTKLSAISVLYL

SEQ ID NO: 1526 - protein, 19 aa, Artificial Sequence
  Non-cyclic GFR-binding peptide
  MOD_RES (5)..(6): Xaa is C or S
IPKAXXVPTELSATSMLYY

SEQ ID NO: 1527 - protein, 20 aa, Artificial Sequence
  Non-cyclic GFR-binding peptide
  MOD_RES (5)..(5): Xaa is C or S
RNVQXRPTQVQLSAISVLYL

SEQ ID NO: 1528 - protein, 15 aa, Artificial Sequence
  Non-cyclic GFR-binding peptide
RPTQVQLSAISVLYL

SEQ ID NO: 1529 - protein, 17 aa, Artificial Sequence
  Non-cyclic GFR-binding peptide
  MOD_RES (3)..(4): Xaa is C or S
KPXXAPTQLSAISVLYL

SEQ ID NO: 1530 - protein, 18 aa, Artificial Sequence
  Non-cyclic GFR-binding peptide
  MOD_RES (4)..(5): Xaa is C or S
ASPXXVSQDLSAISILYL

SEQ ID NO: 1531 - protein, 9 aa, Artificial Sequence
  Non-cyclic GFR-binding peptide
LNAISILYF

SEQ ID NO: 1532 - protein, 17 aa, Artificial Sequence
  Non-cyclic GFR-binding peptide
  MOD_RES (3)..(4): Xaa is C or S
KAXXVPTKLSATSVLYY

SEQ ID NO: 1533 - protein, 17 aa, Artificial Sequence
  Non-cyclic GFR-binding peptide
  MOD_RES (3)..(4): Xaa is C or S
SPXXVSQDLSPISILYK

SEQ ID NO: 1534 - protein, 14 aa, Artificial Sequence
  Non-cyclic GFR-binding peptide
  MOD_RES (1)..(1): Xaa is C or S
XVPQALNAISILYF

SEQ ID NO: 1535 - protein, 17 aa, Artificial Sequence
  Non-cyclic GFR-binding peptide
  MOD_RES (3)..(4): Xaa is C or S
KAXXAPTKLSAISVLYL

SEQ ID NO: 1536 - protein, 10 aa, Artificial Sequence
  Non-cyclic GFR-binding peptide
QLSAISVLYL

SEQ ID NO: 1537 - protein, 15 aa, Artificial Sequence
  Non-cyclic GFR-binding peptide
  MOD_RES (1)..(2): Xaa is C or S
XXAPTKLSPISVLYK

SEQ ID NO: 1538 - protein, 11 aa, Artificial Sequence
  Non-cyclic GFR-binding peptide
VQLSAISVLYL

SEQ ID NO: 1539 - protein, 12 aa, Artificial Sequence
  Non-cyclic GFR-binding peptide
QVQLSAISVLYL

SEQ ID NO: 1540 - protein, 16 aa, Artificial Sequence
  Non-cyclic GFR-binding peptide
  MOD_RES (2)..(3): Xaa is C or S
PXXAPTKLSPISVLYK

SEQ ID NO: 1541 - protein, 19 aa, Artificial Sequence
  Non-cyclic GFR-binding peptide
  MOD_RES (5)..(6): Xaa is C or S
SAAPXXVPQALSPISILYK

SEQ ID NO: 1542 - protein, 19 aa, Artificial Sequence
  Non-cyclic GFR-binding peptide
  MOD_RES (5)..(6): Xaa is C or S
SAAPXXVPQALNAISILYF

SEQ ID NO: 1543 - protein, 19 aa, Artificial Sequence
  Non-cyclic GFR-binding peptide
  MOD_RES (5)..(6): Xaa is C or S
IPKAXXVPTELSPISMLYK

SEQ ID NO: 1544 - protein, 13 aa, Artificial Sequence
  Non-cyclic GFR-binding peptide
VPQDLSPISILYK

SEQ ID NO: 1545 - protein, 10 aa, Artificial Sequence
  Non-cyclic GFR-binding peptide
QLSATSVLYY

SEQ ID NO: 1546 - protein, 19 aa, Artificial Sequence
  Non-cyclic GFR-binding peptide
  MOD_RES (4)..(4): Xaa is C or S
NVQXRPTQVQLSATSVLYY

SEQ ID NO: 1547 - protein, 14 aa, Artificial Sequence
  Non-cyclic GFR-binding peptide
  MOD_RES (1)..(1): Xaa is C or S
XAPTQLSPISVLYK

SEQ ID NO: 1548 - protein, 12 aa, Artificial Sequence
  Non-cyclic GFR-binding peptide
PTELNAISMLYF

SEQ ID NO: 1549 - protein, 12 aa, Artificial Sequence
  Non-cyclic GFR-binding peptide
QVQLSATSVLYY

SEQ ID NO: 1550 - protein, 17 aa, Artificial Sequence
  Non-cyclic GFR-binding peptide
  MOD_RES (3)..(4): Xaa is C or S
SPXXVPQDLSATSILYY

SEQ ID NO: 1551 - protein, 16 aa, Artificial Sequence
  Non-cyclic GFR-binding peptide
  MOD_RES (2)..(3): Xaa is C or S
AXXVPTELSPISMLYK

SEQ ID NO: 1552 - protein, 19 aa, Artificial Sequence
  Non-cyclic GFR-binding peptide
  MOD_RES (4)..(4): Xaa is C or S
NVQXRPTQVQLSAISVLYL

SEQ ID NO: 1553 - protein, 15 aa, Artificial Sequence
  Non-cyclic GFR-binding peptide
RPTQVQLSATSVLYY

SEQ ID NO: 1554 - protein, 14 aa, Artificial Sequence
  Non-cyclic GFR-binding peptide
PTQVQLSATSVLYY

SEQ ID NO: 1555 - protein, 9 aa, Artificial Sequence
  Non-cyclic GFR-binding peptide
LSATSILYY

SEQ ID NO: 1556 - protein, 17 aa, Artificial Sequence
  Non-cyclic GFR-binding peptide
  MOD_RES (3)..(4): Xaa is C or S
KAXXVPTELSATSMLYY

SEQ ID NO: 1557 - protein, 18 aa, Artificial Sequence
  Non-cyclic GFR-binding peptide
  MOD_RES (5)..(5): Xaa is C or S
TKPTXAPTKLSATSVLYY

SEQ ID NO: 1558 - protein, 13 aa, Artificial Sequence
  Non-cyclic GFR-binding peptide
VPTELSPISMLYK

SEQ ID NO: 1559 - protein, 16 aa, Artificial Sequence
  Non-cyclic GFR-binding peptide
  MOD_RES (1)..(1): Xaa is C or S
XRPTQVQLSPISVLYK

SEQ ID NO: 1560 - protein, 13 aa, Artificial Sequence
  Non-cyclic GFR-binding peptide
VPTKLNAISVLYF

SEQ ID NO: 1561 - protein, 14 aa, Artificial Sequence
  Non-cyclic GFR-binding peptide
  MOD_RES (1)..(1): Xaa is C or S
XVSQDLSPISILYK

SEQ ID NO: 1562 - protein, 19 aa, Artificial Sequence
  Non-cyclic GFR-binding peptide
  MOD_RES (5)..(6): Xaa is C or S
VPKAXXAPTKLNAISVLYF

SEQ ID NO: 1563 - protein, 12 aa, Artificial Sequence
  Non-cyclic GFR-binding peptide
PQDLNAISILYF

SEQ ID NO: 1564 - protein, 14 aa, Artificial Sequence
  Non-cyclic GFR-binding peptide
  MOD_RES (1)..(1): Xaa is C or S
XAPTKLSAISVLYL

SEQ ID NO: 1565 - protein, 16 aa, Artificial Sequence
  Non-cyclic GFR-binding peptide
  MOD_RES (1)..(1): Xaa is C or S
XRPTQVQLNAISVLYF

SEQ ID NO: 1566 - protein, 17 aa, Artificial Sequence
  Non-cyclic GFR-binding peptide
  MOD_RES (3)..(4): Xaa is C or S
SPXXVPQDLSAISILYL

SEQ ID NO: 1567 - protein, 19 aa, Artificial Sequence
  Non-cyclic GFR-binding peptide
  MOD_RES (5)..(6): Xaa is C or S
VPKPXXAPTKLSAISVLYL

SEQ ID NO: 1568 - protein, 19 aa, Artificial Sequence
  Non-cyclic GFR-binding peptide
  MOD_RES (5)..(6): Xaa is C or S
IPKAXXVPTELNAISMLYF

SEQ ID NO: 1569 - protein, 14 aa, Artificial Sequence
  Non-cyclic GFR-binding peptide
  MOD_RES (1)..(1): Xaa is C or S
XVPTKLSATSVLYY

SEQ ID NO: 1570 - protein, 20 aa, Artificial Sequence
  Non-cyclic GFR-binding peptide
  MOD_RES (6)..(7): Xaa is C or S
SIPKAXXVPTELSPISMLYK

SEQ ID NO: 1571 - protein, 19 aa, Artificial Sequence
  Non-cyclic GFR-binding peptide
  MOD_RES (5)..(6): Xaa is C or S
SASPXXVPQDLNAISILYF

SEQ ID NO: 1572 - protein, 19 aa, Artificial Sequence
  Non-cyclic GFR-binding peptide
  MOD_RES (5)..(6): Xaa is C or S
VGKAXXVPTKLSAISVLYL

SEQ ID NO: 1573 - protein, 20 aa, Artificial Sequence
  Non-cyclic GFR-binding peptide
  MOD_RES (6)..(7): Xaa is C or S
SIPKAXXVPTELNAISMLYF

SEQ ID NO: 1574 - protein, 19 aa, Artificial Sequence
  Non-cyclic GFR-binding peptide
  MOD_RES (5)..(6): Xaa is C or S
VPKAXXAPTKLSPISVLYK

SEQ ID NO: 1575 - protein, 16 aa, Artificial Sequence
  Non-cyclic GFR-binding peptide
  MOD_RES (2)..(3): Xaa is C or S
AXXVPTELNAISMLYF

SEQ ID NO: 1576 - protein, 17 aa, Artificial Sequence
  Non-cyclic GFR-binding peptide
  MOD_RES (3)..(4): Xaa is C or S
APXXVPQALSATSILYY

SEQ ID NO: 1577 - protein, 15 aa, Artificial Sequence
  Non-cyclic GFR-binding peptide
  MOD_RES (1)..(2): Xaa is C or S
XXVPQDLSAISILYL

SEQ ID NO: 1578 - protein, 10 aa, Artificial Sequence
  Non-cyclic GFR-binding peptide
DLSAISILYL

SEQ ID NO: 1579 - protein, 17 aa, Artificial Sequence
  Non-cyclic GFR-binding peptide
  MOD_RES (3)..(4): Xaa is C or S
KAXXVPTKLSAISVLYL

SEQ ID NO: 1580 - protein, 19 aa, Artificial Sequence
  Non-cyclic GFR-binding peptide
  MOD_RES (5)..(6): Xaa is C or S
SASPXXVPQDLSPISILYK

SEQ ID NO: 1581 - protein, 9 aa, Artificial Sequence
  Non-cyclic GFR-binding peptide
LNAISMLYF

SEQ ID NO: 1582 - protein, 20 aa, Artificial Sequence
  Non-cyclic GFR-binding peptide
  MOD_RES (6)..(7): Xaa is C or S
AVPKAXXAPTKLSAISVLYL

SEQ ID NO: 1583 - protein, 20 aa, Artificial Sequence
  Non-cyclic GFR-binding peptide
  MOD_RES (6)..(7): Xaa is C or S
YVPKPXXAPTKLSPISVLYK

SEQ ID NO: 1584 - protein, 10 aa, Artificial Sequence
  Non-cyclic GFR-binding peptide
DLSATSILYY

SEQ ID NO: 1585 - protein, 16 aa, Artificial Sequence
  Non-cyclic GFR-binding peptide
  MOD_RES (2)..(3): Xaa is C or S
AXXAPTKLNAISVLYF

SEQ ID NO: 1586 - protein, 16 aa, Artificial Sequence
  Non-cyclic GFR-binding peptide
  MOD_RES (3)..(3): Xaa is C or S
PTXAPTKLSATSVLYY

SEQ ID NO: 1587 - protein, 11 aa, Artificial Sequence
  Non-cyclic GFR-binding peptide
TQLSATSVLYY

SEQ ID NO: 1588 - protein, 17 aa, Artificial Sequence
  Non-cyclic GFR-binding peptide
  MOD_RES (3)..(4): Xaa is C or S
APXXVPQALSAISILYL

SEQ ID NO: 1589 - protein, 15 aa, Artificial Sequence
  Non-cyclic GFR-binding peptide
  MOD_RES (1)..(2): Xaa is C or S
XXVPTKLSAISVLYL

SEQ ID NO: 1590 - protein, 16 aa, Artificial Sequence
  Non-cyclic GFR-binding peptide
  MOD_RES (3)..(3): Xaa is C or S
PTXAPTKLSAISVLYL

SEQ ID NO: 1591 - protein, 14 aa, Artificial Sequence
  Non-cyclic GFR-binding peptide
  MOD_RES (1)..(1): Xaa is C or S
XVSQDLSAISILYL

SEQ ID NO: 1592 - protein, 15 aa, Artificial Sequence
  Non-cyclic GFR-binding peptide
  MOD_RES (1)..(2): Xaa is C or S
XXVPTKLNAISVLYF

SEQ ID NO: 1593 - protein, 19 aa, Artificial Sequence
  Non-cyclic GFR-binding peptide
  MOD_RES (5)..(6): Xaa is C or S
VGKAXXVPTKLSATSVLYY

SEQ ID NO: 1594 - protein, 9 aa, Artificial Sequence
  Non-cyclic GFR-binding peptide
LSAISVLYL

SEQ ID NO: 1595 - protein, 11 aa, Artificial Sequence
  Non-cyclic GFR-binding peptide
VQLSPISVLYK

SEQ ID NO: 1596 - protein, 11 aa, Artificial Sequence
  Non-cyclic GFR-binding peptide
QALSAISILYL

SEQ ID NO: 1597 - protein, 11 aa, Artificial Sequence
  Non-cyclic GFR-binding peptide
TQLSPISVLYK

SEQ ID NO: 1598 - protein, 16 aa, Artificial Sequence
  Non-cyclic GFR-binding peptide
  MOD_RES (2)..(3): Xaa is C or S
PXXVPQDLSAISILYL

SEQ ID NO: 1599 - protein, 20 aa, Artificial Sequence
  Non-cyclic GFR-binding peptide
  MOD_RES (6)..(7): Xaa is C or S
ASASPXXVPQDLSATSILYY

SEQ ID NO: 1600 - protein, 17 aa, Artificial Sequence
  Non-cyclic GFR-binding peptide
  MOD_RES (3)..(4): Xaa is C or S
KPXXAPTKLSATSVLYY

SEQ ID NO: 1601 - protein, 15 aa, Artificial Sequence
  Non-cyclic GFR-binding peptide
  MOD_RES (1)..(2): Xaa is C or S
XXVPTKLSATSVLYY

SEQ ID NO: 1602 - protein, 19 aa, Artificial Sequence
  Non-cyclic GFR-binding peptide
  MOD_RES (5)..(6): Xaa is C or S
VPKPXXAPTQLSPISVLYK

SEQ ID NO: 1603 - protein, 20 aa, Artificial Sequence
  Non-cyclic GFR-binding peptide
  MOD_RES (6)..(7): Xaa is C or S
KVGKAXXVPTKLSAISVLYL

SEQ ID NO: 1604 - protein, 20 aa, Artificial Sequence
  Non-cyclic GFR-binding peptide
  MOD_RES (6)..(7): Xaa is C or S
ASASPXXVSQDLSAISILYL

SEQ ID NO: 1605 - protein, 18 aa, Artificial Sequence
  Non-cyclic GFR-binding peptide
  MOD_RES (4)..(5): Xaa is C or S
AAPXXVPQALNAISILYF

SEQ ID NO: 1606 - protein, 16 aa, Artificial Sequence
  Non-cyclic GFR-binding peptide
  MOD_RES (2)..(3): Xaa is C or S
AXXAPTKLSPISVLYK

SEQ ID NO: 1607 - protein, 16 aa, Artificial Sequence
  Non-cyclic GFR-binding peptide
  MOD_RES (3)..(3): Xaa is C or S
PTXAPTKLSPISVLYK

SEQ ID NO: 1608 - protein, 15 aa, Artificial Sequence
  Non-cyclic GFR-binding peptide
  MOD_RES (1)..(2): Xaa is C or S
XXVSQDLNAISILYF

SEQ ID NO: 1609 - protein, 19 aa, Artificial Sequence
  Non-cyclic GFR-binding peptide
  MOD_RES (5)..(6): Xaa is C or S
VPKPXXAPTKLSPISVLYK

SEQ ID NO: 1610 - protein, 15 aa, Artificial Sequence
  Non-cyclic GFR-binding peptide
  MOD_RES (1)..(2): Xaa is C or S
XXVPQDLSATSILYY

SEQ ID NO: 1611 - protein, 16 aa, Artificial Sequence
  Non-cyclic GFR-binding peptide
  MOD_RES (2)..(3): Xaa is C or S
PXXAPTKLSAISVLYL

SEQ ID NO: 1612 - protein, 13 aa, Artificial Sequence
  Non-cyclic GFR-binding peptide
VPTKLSAISVLYL

SEQ ID NO: 1613 - protein, 13 aa, Artificial Sequence
  Non-cyclic GFR-binding peptide
VPQDLSATSILYY

SEQ ID NO: 1614 - protein, 12 aa, Artificial Sequence
  Non-cyclic GFR-binding peptide
QVQLSPISVLYK

SEQ ID NO: 1615 - protein, 20 aa, Artificial Sequence
  Non-cyclic GFR-binding peptide
  MOD_RES (6)..(7): Xaa is C or S
KVGKAXXVPTKLSATSVLYY

SEQ ID NO: 1616 - protein, 11 aa, Artificial Sequence
  Non-cyclic GFR-binding peptide
QALNAISILYF

SEQ ID NO: 1617 - protein, 20 aa, Artificial Sequence
  Non-cyclic GFR-binding peptide
  MOD_RES (6)..(7): Xaa is C or S
ASASPXXVSQDLNAISILYF

SEQ ID NO: 1618 - protein, 14 aa, Artificial Sequence
  Non-cyclic GFR-binding peptide
PTQVQLSAISVLYL

SEQ ID NO: 1619 - protein, 10 aa, Artificial Sequence
  Non-cyclic GFR-binding peptide
QLSPISVLYK

SEQ ID NO: 1620 - protein, 11 aa, Artificial Sequence
  Non-cyclic GFR-binding peptide
TQLSAISVLYL

SEQ ID NO: 1621 - protein, 14 aa, Artificial Sequence
  Non-cyclic GFR-binding peptide
  MOD_RES (1)..(1): Xaa is C or S
XAPTQLSAISVLYL

SEQ ID NO: 1622 - protein, 13 aa, Artificial Sequence
  Non-cyclic GFR-binding peptide
VSQDLNAISILYF

SEQ ID NO: 1623 - protein, 11 aa, Artificial Sequence
  Non-cyclic GFR-binding peptide
QDLSAISILYL

SEQ ID NO: 1624 - protein, 16 aa, Artificial Sequence
  Non-cyclic GFR-binding peptide
  MOD_RES (2)..(3): Xaa is C or S
PXXVPQDLSPISILYK

SEQ ID NO: 1625 - protein, 15 aa, Artificial Sequence
  Non-cyclic GFR-binding peptide
  MOD_RES (1)..(2): Xaa is C or S
XXVSQDLSPISILYK

SEQ ID NO: 1626 - protein, 18 aa, Artificial Sequence
  Non-cyclic GFR-binding peptide
  MOD_RES (4)..(5): Xaa is C or S
ASPXXVPQDLNAISILYF

SEQ ID NO: 1627 - protein, 11 aa, Artificial Sequence
  Non-cyclic GFR-binding peptide
QALSPISILYK

SEQ ID NO: 1628 - protein, 20 aa, Artificial Sequence
  Non-cyclic GFR-binding peptide
  MOD_RES (6)..(7): Xaa is C or S
ASASPXXVSQDLSPISILYK

SEQ ID NO: 1629 - protein, 15 aa, Artificial Sequence
  Non-cyclic GFR-binding peptide
  MOD_RES (1)..(2): Xaa is C or S
XXVPTELSATSMLYY

SEQ ID NO: 1630 - protein, 17 aa, Artificial Sequence
  Non-cyclic GFR-binding peptide
  MOD_RES (4)..(4): Xaa is C or S
KPTXAPTKLSPISVLYK

SEQ ID NO: 1631 - protein, 14 aa, Artificial Sequence
  Non-cyclic GFR-binding peptide
  MOD_RES (1)..(1): Xaa is C or S
XVSQDLSATSILYY

SEQ ID NO: 1632 - protein, 16 aa, Artificial Sequence
  Non-cyclic GFR-binding peptide
  MOD_RES (2)..(3): Xaa is C or S
PXXVPQDLNAISILYF

SEQ ID NO: 1633 - protein, 13 aa, Artificial Sequence
  Non-cyclic GFR-binding peptide
VSQDLSPISILYK

SEQ ID NO: 1634 - protein, 13 aa, Artificial Sequence
  Non-cyclic GFR-binding peptide
VPTELSATSMLYY

SEQ ID NO: 1635 - protein, 14 aa, Artificial Sequence
  Non-cyclic GFR-binding peptide
  MOD_RES (1)..(1): Xaa is C or S
XAPTQLSATSVLYY

SEQ ID NO: 1636 - protein, 9 aa, Artificial Sequence
  Non-cyclic GFR-binding peptide
LSPISILYK

SEQ ID NO: 1637 - protein, 16 aa, Artificial Sequence
  Non-cyclic GFR-binding peptide
  MOD_RES (1)..(1): Xaa is C or S
XRPTQVQLSATSVLYY

SEQ ID NO: 1638 - protein, 15 aa, Artificial Sequence
  Non-cyclic GFR-binding peptide
  MOD_RES (1)..(2): Xaa is C or S
XXVPQALSPISILYK

SEQ ID NO: 1639 - protein, 16 aa, Artificial Sequence
  Non-cyclic GFR-binding peptide
  MOD_RES (2)..(3): Xaa is C or S
PXXAPTQLSPISVLYK

SEQ ID NO: 1640 - protein, 12 aa, Artificial Sequence
  Non-cyclic GFR-binding peptide
QVQLNAISVLYF

SEQ ID NO: 1641 - protein, 16 aa, Artificial Sequence
  Non-cyclic GFR-binding peptide
  MOD_RES (2)..(3): Xaa is C or S
AXXVPTELSATSMLYY

SEQ ID NO: 1642 - protein, 19 aa, Artificial Sequence
  Non-cyclic GFR-binding peptide
  MOD_RES (5)..(6): Xaa is C or S
SASPXXVSQDLNAISILYF

SEQ ID NO: 1643 - protein, 17 aa, Artificial Sequence
  Non-cyclic GFR-binding peptide
  MOD_RES (4)..(4): Xaa is C or S
KPTXAPTKLSATSVLYY

SEQ ID NO: 1644 - protein, 18 aa, Artificial Sequence
  Non-cyclic GFR-binding peptide
  MOD_RES (4)..(5): Xaa is C or S
AAPXXVPQALSPISILYK

SEQ ID NO: 1645 - protein, 20 aa, Artificial Sequence
  Non-cyclic GFR-binding peptide
  MOD_RES (7)..(7): Xaa is C or S
HVTKPTXAPTKLSATSVLYY

SEQ ID NO: 1646 - protein, 14 aa, Artificial Sequence
  Non-cyclic GFR-binding peptide
PTQVQLSPISVLYK

SEQ ID NO: 1647 - protein, 13 aa, Artificial Sequence
  Non-cyclic GFR-binding peptide
VPTKLSATSVLYY

SEQ ID NO: 1648 - protein, 20 aa, Artificial Sequence
  Non-cyclic GFR-binding peptide
  MOD_RES (6)..(7): Xaa is C or S
YVPKPXXAPTKLSAISVLYL

SEQ ID NO: 1649 - protein, 16 aa, Artificial Sequence
  Non-cyclic GFR-binding peptide
  MOD_RES (2)..(3): Xaa is C or S
PXXVPQALNAISILYF

SEQ ID NO: 1650 - protein, 10 aa, Artificial Sequence
  Non-cyclic GFR-binding peptide
KLSAISVLYL

SEQ ID NO: 1651 - protein, 14 aa, Artificial Sequence
  Non-cyclic GFR-binding peptide
  MOD_RES (1)..(1): Xaa is C or S
XAPTKLSPISVLYK

SEQ ID NO: 1652 - protein, 15 aa, Artificial Sequence
  Non-cyclic GFR-binding peptide
  MOD_RES (1)..(2): Xaa is C or S
XXVSQDLSAISILYL

SEQ ID NO: 1653 - protein, 18 aa, Artificial Sequence
  Non-cyclic GFR-binding peptide
  MOD_RES (4)..(5): Xaa is C or S
PKPXXAPTQLSPISVLYK

SEQ ID NO: 1654 - protein, 20 aa, Artificial Sequence
  Non-cyclic GFR-binding peptide
  MOD_RES (6)..(7): Xaa is C or S
KVGKAXXVPTKLNAISVLYF

SEQ ID NO: 1655 - protein, 13 aa, Artificial Sequence
  Non-cyclic GFR-binding peptide
APTQLSPISVLYK

SEQ ID NO: 1656 - protein, 18 aa, Artificial Sequence
  Non-cyclic GFR-binding peptide
  MOD_RES (4)..(5): Xaa is C or S
ASPXXVSQDLSATSILYY

SEQ ID NO: 1657 - protein, 10 aa, Artificial Sequence
  Non-cyclic GFR-binding peptide
ALSPISILYK

SEQ ID NO: 1658 - protein, 18 aa, Artificial Sequence
  Non-cyclic GFR-binding peptide
  MOD_RES (4)..(5): Xaa is C or S
PKAXXVPTELSATSMLYY

SEQ ID NO: 1659 - protein, 17 aa, Artificial Sequence
  Non-cyclic GFR-binding peptide
  MOD_RES (3)..(4): Xaa is C or S
KAXXAPTKLSPISVLYK

SEQ ID NO: 1660 - protein, 12 aa, Artificial Sequence
  Non-cyclic GFR-binding peptide
PQALSATSILYY

SEQ ID NO: 1661 - protein, 14 aa, Artificial Sequence
  Non-cyclic GFR-binding peptide
  MOD_RES (1)..(1): Xaa is C or S
XVPQALSATSILYY

SEQ ID NO: 1662 - protein, 12 aa, Artificial Sequence
  Non-cyclic GFR-binding peptide
PQDLSPISILYK

SEQ ID NO: 1663 - protein, 13 aa, Artificial Sequence
  Non-cyclic GFR-binding peptide
VPQALSPISILYK

SEQ ID NO: 1664 - protein, 13 aa, Artificial Sequence
  Non-cyclic GFR-binding peptide
TQVQLSATSVLYY

SEQ ID NO: 1665 - protein, 20 aa, Artificial Sequence
  Non-cyclic GFR-binding peptide
  MOD_RES (6)..(7): Xaa is C or S
ASAAPXXVPQALSATSILYY

SEQ ID NO: 1666 - protein, 15 aa, Artificial Sequence
  Non-cyclic GFR-binding peptide
  MOD_RES (1)..(2): Xaa is C or S
XXAPTQLSPISVLYK

SEQ ID NO: 1667 - protein, 11 aa, Artificial Sequence
  Non-cyclic GFR-binding peptide
TELSATSMLYY

SEQ ID NO: 1668 - protein, 19 aa, Artificial Sequence
  Non-cyclic GFR-binding peptide
  MOD_RES (5)..(6): Xaa is C or S
SAAPXXVPQALSAISILYL

SEQ ID NO: 1669 - protein, 15 aa, Artificial Sequence
  Non-cyclic GFR-binding peptide
  MOD_RES (1)..(2): Xaa is C or S
XXVPTELNAISMLYF

SEQ ID NO: 1670 - protein, 18 aa, Artificial Sequence
  Non-cyclic GFR-binding peptide
  MOD_RES (4)..(5): Xaa is C or S
PKPXXAPTKLSATSVLYY

SEQ ID NO: 1671 - protein, 14 aa, Artificial Sequence
  Non-cyclic GFR-binding peptide
  MOD_RES (1)..(1): Xaa is C or S
XVPQDLSPISILYK

SEQ ID NO: 1672 - protein, 20 aa, Artificial Sequence
  Non-cyclic GFR-binding peptide
  MOD_RES (6)..(7): Xaa is C or S
ASASPXXVPQDLSAISILYL

SEQ ID NO: 1673 - protein, 19 aa, Artificial Sequence
  Non-cyclic GFR-binding peptide
  MOD_RES (6)..(6): Xaa is C or S
VTKPTXAPTKLSPISVLYK

SEQ ID NO: 1674 - protein, 15 aa, Artificial Sequence
  Non-cyclic GFR-binding peptide
  MOD_RES (2)..(2): Xaa is C or S
TXAPTKLSAISVLYL

SEQ ID NO: 1675 - protein, 18 aa, Artificial Sequence
  Non-cyclic GFR-binding peptide
  MOD_RES (4)..(5): Xaa is C or S
PKAXXAPTKLSPISVLYK

SEQ ID NO: 1676 - protein, 12 aa, Artificial Sequence
  Non-cyclic GFR-binding peptide
PTKLSAISVLYL

SEQ ID NO: 1677 - protein, 15 aa, Artificial Sequence
  Non-cyclic GFR-binding peptide
  MOD_RES (1)..(2): Xaa is C or S
XXVPQDLSPISILYK

SEQ ID NO: 1678 - protein, 15 aa, Artificial Sequence
  Non-cyclic GFR-binding peptide
RPTQVQLSPISVLYK

SEQ ID NO: 1679 - protein, 17 aa, Artificial Sequence
  Non-cyclic GFR-binding peptide
  MOD_RES (2)..(2): Xaa is C or S
QXRPTQVQLNAISVLYF

SEQ ID NO: 1680 - protein, 13 aa, Artificial Sequence
  Non-cyclic GFR-binding peptide
VPTELNAISMLYF

SEQ ID NO: 1681 - protein, 19 aa, Artificial Sequence
  Non-cyclic GFR-binding peptide
  MOD_RES (5)..(6): Xaa is C or S
VPKPXXAPTKLSATSVLYY

SEQ ID NO: 1682 - protein, 20 aa, Artificial Sequence
  Non-cyclic GFR-binding peptide
  MOD_RES (6)..(7): Xaa is C or S
ASAAPXXVPQALSPISILYK

SEQ ID NO: 1683 - protein, 18 aa, Artificial Sequence
  Non-cyclic GFR-binding peptide
  MOD_RES (4)..(5): Xaa is C or S
PKPXXAPTQLSATSVLYY

SEQ ID NO: 1684 - protein, 20 aa, Artificial Sequence
  Non-cyclic GFR-binding peptide
  MOD_RES (6)..(7): Xaa is C or S
KIPKAXXVPTELSPISMLYK

SEQ ID NO: 1685 - protein, 17 aa, Artificial Sequence
  Non-cyclic GFR-binding peptide
  MOD_RES (3)..(4): Xaa is C or S
KPXXAPTQLSATSVLYY

SEQ ID NO: 1686 - protein, 20 aa, Artificial Sequence
  Non-cyclic GFR-binding peptide
  MOD_RES (6)..(7): Xaa is C or S
ASASPXXVSQDLSATSILYY

SEQ ID NO: 1687 - protein, 16 aa, Artificial Sequence
  Non-cyclic GFR-binding peptide
  MOD_RES (2)..(3): Xaa is C or S
AXXVPTKLSATSVLYY

SEQ ID NO: 1688 - protein, 12 aa, Artificial Sequence
  Non-cyclic GFR-binding peptide
SQDLSPISILYK

SEQ ID NO: 1689 - protein, 20 aa, Artificial Sequence
  Non-cyclic GFR-binding peptide
  MOD_RES (6)..(7): Xaa is C or S
KIPKAXXVPTELSATSMLYY

SEQ ID NO: 1690 - protein, 17 aa, Artificial Sequence
  Non-cyclic GFR-binding peptide
  MOD_RES (3)..(4): Xaa is C or S
KPXXAPTKLSPISVLYK

SEQ ID NO: 1691 - protein, 17 aa, Artificial Sequence
  Non-cyclic GFR-binding peptide
  MOD_RES (3)..(4): Xaa is C or S
KPXXAPTQLSPISVLYK

SEQ ID NO: 1692 - protein, 12 aa, Artificial Sequence
  Non-cyclic GFR-binding peptide
PQDLSATSILYY

SEQ ID NO: 1693 - protein, 16 aa, Artificial Sequence
  Non-cyclic GFR-binding peptide
  MOD_RES (2)..(3): Xaa is C or S
PXXVSQDLNAISILYF

SEQ ID NO: 1694 - protein, 14 aa, Artificial Sequence
  Non-cyclic GFR-binding peptide
  MOD_RES (1)..(1): Xaa is C or S
XVPQDLSATSILYY

SEQ ID NO: 1695 - protein, 18 aa, Artificial Sequence
  Non-cyclic GFR-binding peptide
  MOD_RES (3)..(3): Xaa is C or S
VQXRPTQVQLSPISVLYK

SEQ ID NO: 1696 - protein, 14 aa, Artificial Sequence
  Non-cyclic GFR-binding peptide
  MOD_RES (1)..(1): Xaa is C or S
XVPQALSPISILYK

SEQ ID NO: 1697 - protein, 14 aa, Artificial Sequence
  Non-cyclic GFR-binding peptide
  MOD_RES (1)..(1): Xaa is C or S
XVPTELNAISMLYF

SEQ ID NO: 1698 - protein, 17 aa, Artificial Sequence
  Non-cyclic GFR-binding peptide
  MOD_RES (3)..(4): Xaa is C or S
SPXXVSQDLSAISILYL

SEQ ID NO: 1699 - protein, 13 aa, Artificial Sequence
  Non-cyclic GFR-binding peptide
TQVQLSPISVLYK

SEQ ID NO: 1700 - protein, 20 aa, Artificial Sequence
  Non-cyclic GFR-binding peptide
  MOD_RES (5)..(5): Xaa is C or S
RNVQXRPTQVQLSPISVLYK

SEQ ID NO: 1701 - protein, 20 aa, Artificial Sequence
  Non-cyclic GFR-binding peptide
  MOD_RES (6)..(7): Xaa is C or S
ASASPXXVPQDLNAISILYF

SEQ ID NO: 1702 - protein, 12 aa, Artificial Sequence
  Non-cyclic GFR-binding peptide
PTQLSAISVLYL

SEQ ID NO: 1703 - protein, 18 aa, Artificial Sequence
  Non-cyclic GFR-binding peptide
  MOD_RES (5)..(5): Xaa is C or S
TKPTXAPTKLSPISVLYK

SEQ ID NO: 1704 - protein, 18 aa, Artificial Sequence
  Non-cyclic GFR-binding peptide
  MOD_RES (4)..(5): Xaa is C or S
PKPXXAPTKLSPISVLYK

SEQ ID NO: 1705 - protein, 14 aa, Artificial Sequence
  Non-cyclic GFR-binding peptide
  MOD_RES (1)..(1): Xaa is C or S
XVPTKLNAISVLYF

SEQ ID NO: 1706 - protein, 10 aa, Artificial Sequence
  Non-cyclic GFR-binding peptide
DLSPISILYK

SEQ ID NO: 1707 - protein, 15 aa, Artificial Sequence
  Non-cyclic GFR-binding peptide
  MOD_RES (1)..(2): Xaa is C or S
XXAPTQLSATSVLYY

SEQ ID NO: 1708 - protein, 14 aa, Artificial Sequence
  Non-cyclic GFR-binding peptide
  MOD_RES (1)..(1): Xaa is C or S
XVPTKLSAISVLYL

SEQ ID NO: 1709 - protein, 20 aa, Artificial Sequence
  Non-cyclic GFR-binding peptide
  MOD_RES (7)..(7): Xaa is C or S
HVTKPTXAPTKLSPISVLYK

SEQ ID NO: 1710 - protein, 13 aa, Artificial Sequence
  Non-cyclic GFR-binding peptide
APTKLSPISVLYK

SEQ ID NO: 1711 - protein, 19 aa, Artificial Sequence
  Non-cyclic GFR-binding peptide
  MOD_RES (6)..(6): Xaa is C or S
VTKPTXAPTKLSATSVLYY

SEQ ID NO: 1712 - protein, 16 aa, Artificial Sequence
  Non-cyclic GFR-binding peptide
  MOD_RES (2)..(3): Xaa is C or S
PXXVSQDLSAISILYL

SEQ ID NO: 1713 - protein, 13 aa, Artificial Sequence
  Non-cyclic GFR-binding peptide
APTQLSATSVLYY

SEQ ID NO: 1714 - protein, 19 aa, Artificial Sequence
  Non-cyclic GFR-binding peptide
  MOD_RES (4)..(4): Xaa is C or S
NVQXRPTQVQLSPISVLYK

SEQ ID NO: 1715 - protein, 17 aa, Artificial Sequence
  Non-cyclic GFR-binding peptide
  MOD_RES (3)..(4): Xaa is C or S
SPXXVSQDLNAISILYF

SEQ ID NO: 1716 - protein, 11 aa, Artificial Sequence
  Non-cyclic GFR-binding peptide
VQLSATSVLYY

SEQ ID NO: 1717 - protein, 13 aa, Artificial Sequence
  Non-cyclic GFR-binding peptide
IFLVSIPSLKTPA

SEQ ID NO: 1718 - protein, 14 aa, Artificial Sequence
  Non-cyclic GFR-binding peptide
  MOD_RES (14)..(14): Xaa is C or S
IFLISIPSLAQPVX

SEQ ID NO: 1719 - protein, 20 aa, Artificial Sequence
  Non-cyclic GFR-binding peptide
  MOD_RES (14)..(14): Xaa is C or S
IFLVSIPSLKTPAXTPKTVH

SEQ ID NO: 1720 - protein, 11 aa, Artificial Sequence
  Non-cyclic GFR-binding peptide
YYLVTLPELQT

SEQ ID NO: 1721 - protein, 13 aa, Artificial Sequence
  Non-cyclic GFR-binding peptide
YYVIPLPELDQPV

SEQ ID NO: 1722 - protein, 19 aa, Artificial Sequence
  Non-cyclic GFR-binding peptide
  MOD_RES (14)..(15): Xaa is C or S
YYLVTLPELKTPAXXPKPV

SEQ ID NO: 1723 - protein, 17 aa, Artificial Sequence
  Non-cyclic GFR-binding peptide
  MOD_RES (14)..(15): Xaa is C or S
YYLVTLPELQTPAXXPK

SEQ ID NO: 1724 - protein, 18 aa, Artificial Sequence
  Non-cyclic GFR-binding peptide
  MOD_RES (14)..(14): Xaa is C or S
YYLVTLPELKTPAXTPKT

SEQ ID NO: 1725 - protein, 16 aa, Artificial Sequence
  Non-cyclic GFR-binding peptide
  MOD_RES (14)..(15): Xaa is C or S
YYVVPLPELKTPAXXP

SEQ ID NO: 1726 - protein, 16 aa, Artificial Sequence
  Non-cyclic GFR-binding peptide
  MOD_RES (14)..(14): Xaa is C or S
YYLVTLPELKTPAXTP

SEQ ID NO: 1727 - protein, 13 aa, Artificial Sequence
  Non-cyclic GFR-binding peptide
LYLISIASLRTPV

SEQ ID NO: 1728 - protein, 19 aa, Artificial Sequence
  Non-cyclic GFR-binding peptide
  MOD_RES (14)..(15): Xaa is C or S
IFLISIPSLDQPVXXPSAS

SEQ ID NO: 1729 - protein, 9 aa, Artificial Sequence
  Non-cyclic GFR-binding peptide
YYVVPLPEL

SEQ ID NO: 1730 - protein, 20 aa, Artificial Sequence
  Non-cyclic GFR-binding peptide
  MOD_RES (14)..(15): Xaa is C or S
IFLVSIPSLKTPAXXPKPVY

SEQ ID NO: 1731 - protein, 16 aa, Artificial Sequence
  Non-cyclic GFR-binding peptide
  MOD_RES (14)..(15): Xaa is C or S
IFLMSIPSLETPVXXA

SEQ ID NO: 1732 - protein, 20 aa, Artificial Sequence
  Non-cyclic GFR-binding peptide
  MOD_RES (14)..(15): Xaa is C or S
IFLMSIPSLETPVXXAKPIS

SEQ ID NO: 1733 - protein, 10 aa, Artificial Sequence
  Non-cyclic GFR-binding peptide
YYVIPLPELD

SEQ ID NO: 1734 - protein, 13 aa, Artificial Sequence
  Non-cyclic GFR-binding peptide
YYLMTLPELETPV

SEQ ID NO: 1735 - protein, 11 aa, Artificial Sequence
  Non-cyclic GFR-binding peptide
YYVIPLPELRT

SEQ ID NO: 1736 - protein, 19 aa, Artificial Sequence
  Non-cyclic GFR-binding peptide
  MOD_RES (14)..(15): Xaa is C or S
YYVVPLPELKTPAXXPKPV

SEQ ID NO: 1737 - protein, 15 aa, Artificial Sequence
  Non-cyclic GFR-binding peptide
  MOD_RES (14)..(15): Xaa is C or S
YYLMTLPELETPVXX

SEQ ID NO: 1738 - protein, 9 aa, Artificial Sequence
  Non-cyclic GFR-binding peptide
IFLMSIPSL

SEQ ID NO: 1739 - protein, 15 aa, Artificial Sequence
  Non-cyclic GFR-binding peptide
  MOD_RES (14)..(15): Xaa is C or S
IFLISIPSLDQSVXX

SEQ ID NO: 1740 - protein, 16 aa, Artificial Sequence
  Non-cyclic GFR-binding peptide
  MOD_RES (14)..(15): Xaa is C or S
YYVIPLPELDQPVXXP

SEQ ID NO: 1741 - protein, 11 aa, Artificial Sequence
  Non-cyclic GFR-binding peptide
YYVVPLPELQT

SEQ ID NO: 1742 - protein, 17 aa, Artificial Sequence
  Non-cyclic GFR-binding peptide
  MOD_RES (14)..(14): Xaa is C or S
IFLVSIPSLKTPAXTPK

SEQ ID NO: 1743 - protein, 20 aa, Artificial Sequence
  Non-cyclic GFR-binding peptide
  MOD_RES (14)..(15): Xaa is C or S
YYVIPLPELDQSVXXPSASA

SEQ ID NO: 1744 - protein, 20 aa, Artificial Sequence
  Non-cyclic GFR-binding peptide
  MOD_RES (14)..(15): Xaa is C or S
LYLISIASLRTPVXXTPPTS

SEQ ID NO: 1745 - protein, 17 aa, Artificial Sequence
  Non-cyclic GFR-binding peptide
  MOD_RES (14)..(15): Xaa is C or S
YYVVPLPELQTPAXXPK

SEQ ID NO: 1746 - protein, 14 aa, Artificial Sequence
  Non-cyclic GFR-binding peptide
  MOD_RES (14)..(14): Xaa is C or S
YYVVPLPELQTPAX

SEQ ID NO: 1747 - protein, 17 aa, Artificial Sequence
  Non-cyclic GFR-binding peptide
  MOD_RES (14)..(14): Xaa is C or S
YYVVPLPELKTPAXTPK

SEQ ID NO: 1748 - protein, 19 aa, Artificial Sequence
  Non-cyclic GFR-binding peptide
  MOD_RES (14)..(15): Xaa is C or S
IFLMSIPSLETPVXXAKPI

SEQ ID NO: 1749 - protein, 10 aa, Artificial Sequence
  Non-cyclic GFR-binding peptide
YYLITLPELR

SEQ ID NO: 1750 - protein, 16 aa, Artificial Sequence
  Non-cyclic GFR-binding peptide
  MOD_RES (14)..(14): Xaa is C or S
YYVVPLPELKTPAXTP

SEQ ID NO: 1751 - protein, 19 aa, Artificial Sequence
  Non-cyclic GFR-binding peptide
  MOD_RES (14)..(15): Xaa is C or S
LYLISIASLRTPVXXTPPT

SEQ ID NO: 1752 - protein, 16 aa, Artificial Sequence
  Non-cyclic GFR-binding peptide
  MOD_RES (14)..(15): Xaa is C or S
YYLVTLPELKTPAXXP

SEQ ID NO: 1753 - protein, 17 aa, Artificial Sequence
  Non-cyclic GFR-binding peptide
  MOD_RES (14)..(15): Xaa is C or S
YYVIPLPELDQSVXXPS

SEQ ID NO: 1754 - protein, 19 aa, Artificial Sequence
  Non-cyclic GFR-binding peptide
  MOD_RES (14)..(15): Xaa is C or S
IFLISIPSLAQPVXXPAAS

SEQ ID NO: 1755 - protein, 14 aa, Artificial Sequence
  Non-cyclic GFR-binding peptide
  MOD_RES (14)..(14): Xaa is C or S
YYVIPLPELRTPVX

SEQ ID NO: 1756 - protein, 20 aa, Artificial Sequence
  Non-cyclic GFR-binding peptide
  MOD_RES (14)..(15): Xaa is C or S
YYLMTLPELETPVXXAKPIK

SEQ ID NO: 1757 - protein, 15 aa, Artificial Sequence
  Non-cyclic GFR-binding peptide
  MOD_RES (14)..(15): Xaa is C or S
YYVVPLPELKTPAXX

SEQ ID NO: 1758 - protein, 15 aa, Artificial Sequence
  Non-cyclic GFR-binding peptide
  MOD_RES (14)..(14): Xaa is C or S
IFLVSIPSLKTPAXT

SEQ ID NO: 1759 - protein, 13 aa, Artificial Sequence
  Non-cyclic GFR-binding peptide
IFLISIPSLDQPV

SEQ ID NO: 1760 - protein, 13 aa, Artificial Sequence
  Non-cyclic GFR-binding peptide
YYVVPLPELKTPA

SEQ ID NO: 1761 - protein, 13 aa, Artificial Sequence
  Non-cyclic GFR-binding peptide
IFLMSIPSLETPV

SEQ ID NO: 1762 - protein, 10 aa, Artificial Sequence
  Non-cyclic GFR-binding peptide
YYVIPLPELR

SEQ ID NO: 1763 - protein, 20 aa, Artificial Sequence
  Non-cyclic GFR-binding peptide
  MOD_RES (14)..(15): Xaa is C or S
YYVMPLPELETPVXXAKPIS

SEQ ID NO: 1764 - protein, 16 aa, Artificial Sequence
  Non-cyclic GFR-binding peptide
  MOD_RES (14)..(15): Xaa is C or S
YYLITLPELRTPVXXT

SEQ ID NO: 1765 - protein, 12 aa, Artificial Sequence
  Non-cyclic GFR-binding peptide
LYLISIASLRTP

SEQ ID NO: 1766 - protein, 14 aa, Artificial Sequence
  Non-cyclic GFR-binding peptide
  MOD_RES (14)..(14): Xaa is C or S
YYLITLPELRTPVX

SEQ ID NO: 1767 - protein, 14 aa, Artificial Sequence
  Non-cyclic GFR-binding peptide
  MOD_RES (14)..(14): Xaa is C or S
YYLVTLPELKTPAX

SEQ ID NO: 1768 - protein, 16 aa, Artificial Sequence
  Non-cyclic GFR-binding peptide
  MOD_RES (14)..(14): Xaa is C or S
IFLVSIPSLKTPAXTP

SEQ ID NO: 1769 - protein, 17 aa, Artificial Sequence
  Non-cyclic GFR-binding peptide
  MOD_RES (14)..(14): Xaa is C or S
YYLVTLPELKTPAXTPK

SEQ ID NO: 1770 - protein, 14 aa, Artificial Sequence
  Non-cyclic GFR-binding peptide
  MOD_RES (14)..(14): Xaa is C or S
IFLISIPSLDQSVX

SEQ ID NO: 1771 - protein, 19 aa, Artificial Sequence
  Non-cyclic GFR-binding peptide
  MOD_RES (14)..(14): Xaa is C or S
YYLVTLPELKTPAXTPKTV

SEQ ID NO: 1772 - protein, 9 aa, Artificial Sequence
  Non-cyclic GFR-binding peptide
IFLVSIPSL

SEQ ID NO: 1773 - protein, 15 aa, Artificial Sequence
  Non-cyclic GFR-binding peptide
  MOD_RES (14)..(14): Xaa is C or S
YYVVPLPELKTPAXT

SEQ ID NO: 1774 - protein, 16 aa, Artificial Sequence
  Non-cyclic GFR-binding peptide
  MOD_RES (14)..(15): Xaa is C or S
YYLMTLPELETPVXXA

SEQ ID NO: 1775 - protein, 11 aa, Artificial Sequence
  Non-cyclic GFR-binding peptide
IFLISIPSLAQ

SEQ ID NO: 1776 - protein, 20 aa, Artificial Sequence
  Non-cyclic GFR-binding peptide
  MOD_RES (14)..(15): Xaa is C or S
IFLISIPSLDQSVXXPSASA

SEQ ID NO: 1777 - protein, 15 aa, Artificial Sequence
  Non-cyclic GFR-binding peptide
  MOD_RES (14)..(15): Xaa is C or S
YYVIPLPELDQPVXX

SEQ ID NO: 1778 - protein, 14 aa, Artificial Sequence
  Non-cyclic GFR-binding peptide
  MOD_RES (14)..(14): Xaa is C or S
YYLVTLPELQTPAX

SEQ ID NO: 1779 - protein, 13 aa, Artificial Sequence
  Non-cyclic GFR-binding peptide
IFLISIPSLDQSV

SEQ ID NO: 1780 - protein, 18 aa, Artificial Sequence
  Non-cyclic GFR-binding peptide
  MOD_RES (14)..(15): Xaa is C or S
IFLISIPSLDQPVXXPSA

SEQ ID NO: 1781 - protein, 20 aa, Artificial Sequence
  Non-cyclic GFR-binding peptide
  MOD_RES (14)..(14): Xaa is C or S
YYVVPLPELKTPAXTPKTVH

SEQ ID NO: 1782 - protein, 19 aa, Artificial Sequence
  Non-cyclic GFR-binding peptide
  MOD_RES (14)..(15): Xaa is C or S
YYLMTLPELETPVXXAKPI

SEQ ID NO: 1783 - protein, 15 aa, Artificial Sequence
  Non-cyclic GFR-binding peptide
  MOD_RES (14)..(15): Xaa is C or S
IFLISIPSLAQPVXX

SEQ ID NO: 1784 - protein, 16 aa, Artificial Sequence
  Non-cyclic GFR-binding peptide
  MOD_RES (14)..(15): Xaa is C or S
IFLISIPSLDQPVXXP

SEQ ID NO: 1785 - protein, 17 aa, Artificial Sequence
  Non-cyclic GFR-binding peptide
  MOD_RES (14)..(15): Xaa is C or S
YYLMTLPELETPVXXAK

SEQ ID NO: 1786 - protein, 16 aa, Artificial Sequence
  Non-cyclic GFR-binding peptide
  MOD_RES (14)..(15): Xaa is C or S
IFLVSIPSLKTPAXXP

SEQ ID NO: 1787 - protein, 17 aa, Artificial Sequence
  Non-cyclic GFR-binding peptide
  MOD_RES (14)..(15): Xaa is C or S
YYLITLPELAQPVXXPA

SEQ ID NO: 1788 - protein, 10 aa, Artificial Sequence
  Non-cyclic GFR-binding peptide
YYLVTLPELQ

SEQ ID NO: 1789 - protein, 19 aa, Artificial Sequence
  Non-cyclic GFR-binding peptide
  MOD_RES (14)..(15): Xaa is C or S
YYVIPLPELDQPVXXPSAS

SEQ ID NO: 1790 - protein, 11 aa, Artificial Sequence
  Non-cyclic GFR-binding peptide
YYLITLPELAQ

SEQ ID NO: 1791 - protein, 14 aa, Artificial Sequence
  Non-cyclic GFR-binding peptide
  MOD_RES (14)..(14): Xaa is C or S
IFLVSIPSLQTPAX

SEQ ID NO: 1792 - protein, 19 aa, Artificial Sequence
  Non-cyclic GFR-binding peptide
  MOD_RES (14)..(15): Xaa is C or S
IFLVSIPSLQTPAXXPKPV

SEQ ID NO: 1793 - protein, 12 aa, Artificial Sequence
  Non-cyclic GFR-binding peptide
FYLISIANLRTP

SEQ ID NO: 1794 - protein, 20 aa, Artificial Sequence
  Non-cyclic GFR-binding peptide
  MOD_RES (14)..(15): Xaa is C or S
IFLVSIPSLQTPAXXPKPVT

SEQ ID NO: 1795 - protein, 9 aa, Artificial Sequence
  Non-cyclic GFR-binding peptide
YYVMPLPEL

SEQ ID NO: 1796 - protein, 14 aa, Artificial Sequence
  Non-cyclic GFR-binding peptide
  MOD_RES (14)..(14): Xaa is C or S
YYVIPLPELDQSVX

SEQ ID NO: 1797 - protein, 13 aa, Artificial Sequence
  Non-cyclic GFR-binding peptide
YYVMPLPELETPV

SEQ ID NO: 1798 - protein, 11 aa, Artificial Sequence
  Non-cyclic GFR-binding peptide
IFLVSIPSLQT

SEQ ID NO: 1799 - protein, 18 aa, Artificial Sequence
  Non-cyclic GFR-binding peptide
  MOD_RES (14)..(15): Xaa is C or S
IFLISIPSLAQPVXXPAA

SEQ ID NO: 1800 - protein, 15 aa, Artificial Sequence
  Non-cyclic GFR-binding peptide
  MOD_RES (14)..(15): Xaa is C or S
YYVMPLPELETPVXX

SEQ ID NO: 1801 - protein, 9 aa, Artificial Sequence
  Non-cyclic GFR-binding peptide
YYLVTLPEL

SEQ ID NO: 1802 - protein, 13 aa, Artificial Sequence
  Non-cyclic GFR-binding peptide
IFLVSIPSLQTPA

SEQ ID NO: 1803 - protein, 13 aa, Artificial Sequence
  Non-cyclic GFR-binding peptide
YYVIPLPELDQSV

SEQ ID NO: 1804 - protein, 19 aa, Artificial Sequence
  Non-cyclic GFR-binding peptide
  MOD_RES (14)..(15): Xaa is C or S
YYLVTLPELQTPAXXPKPV

SEQ ID NO: 1805 - protein, 14 aa, Artificial Sequence
  Non-cyclic GFR-binding peptide
  MOD_RES (14)..(14): Xaa is C or S
YYLMTLPELETPVX

SEQ ID NO: 1806 - protein, 10 aa, Artificial Sequence
  Non-cyclic GFR-binding peptide
IFLISIPSLA

SEQ ID NO: 1807 - protein, 15 aa, Artificial Sequence
  Non-cyclic GFR-binding peptide
  MOD_RES (14)..(15): Xaa is C or S
YYVIPLPELRTPVXX

SEQ ID NO: 1808 - protein, 20 aa, Artificial Sequence
  Non-cyclic GFR-binding peptide
  MOD_RES (14)..(15): Xaa is C or S
YYLVTLPELKTPAXXPKPVY

SEQ ID NO: 1809 - protein, 14 aa, Artificial Sequence
  Non-cyclic GFR-binding peptide
  MOD_RES (14)..(14): Xaa is C or S
YYVMPLPELETPVX

SEQ ID NO: 1810 - protein, 17 aa, Artificial Sequence
  Non-cyclic GFR-binding peptide
  MOD_RES (14)..(15): Xaa is C or S
YYVIPLPELDQPVXXPS

SEQ ID NO: 1811 - protein, 13 aa, Artificial Sequence
  Non-cyclic GFR-binding peptide
IFLISIPSLAQPV

SEQ ID NO: 1812 - protein, 16 aa, Artificial Sequence
  Non-cyclic GFR-binding peptide
  MOD_RES (14)..(15): Xaa is C or S
YYVIPLPELDQSVXXP

SEQ ID NO: 1813 - protein, 20 aa, Artificial Sequence
  Non-cyclic GFR-binding peptide
  MOD_RES (14)..(15): Xaa is C or S
YYLMTLPELETPVXXAKPIS

SEQ ID NO: 1814 - protein, 12 aa, Artificial Sequence
  Non-cyclic GFR-binding peptide
IFLISIPSLDQS

SEQ ID NO: 1815 - protein, 16 aa, Artificial Sequence
  Non-cyclic GFR-binding peptide
  MOD_RES (14)..(15): Xaa is C or S
FYLISIANLRTPVXXT

SEQ ID NO: 1816 - protein, 9 aa, Artificial Sequence
  Non-cyclic GFR-binding peptide
YYLMTLPEL

SEQ ID NO: 1817 - protein, 10 aa, Artificial Sequence
  Non-cyclic GFR-binding peptide
YYLVTLPELK

SEQ ID NO: 1818 - protein, 15 aa, Artificial Sequence
  Non-cyclic GFR-binding peptide
  MOD_RES (14)..(15): Xaa is C or S
YYVIPLPELDQSVXX

SEQ ID NO: 1819 - protein, 12 aa, Artificial Sequence
  Non-cyclic GFR-binding peptide
YYLMTLPELETP

SEQ ID NO: 1820 - protein, 20 aa, Artificial Sequence
  Non-cyclic GFR-binding peptide
  MOD_RES (14)..(15): Xaa is C or S
YYLVTLPELQTPAXXPKPVT

SEQ ID NO: 1821 - protein, 14 aa, Artificial Sequence
  Non-cyclic GFR-binding peptide
  MOD_RES (14)..(14): Xaa is C or S
IFLVSIPSLKTPAX

SEQ ID NO: 1822 - protein, 10 aa, Artificial Sequence
  Non-cyclic GFR-binding peptide
FYLISIANLR

SEQ ID NO: 1823 - protein, 12 aa, Artificial Sequence
  Non-cyclic GFR-binding peptide
YYVVPLPELKTP

SEQ ID NO: 1824 - protein, 15 aa, Artificial Sequence
  Non-cyclic GFR-binding peptide
  MOD_RES (14)..(15): Xaa is C or S
YYLITLPELRTPVXX

SEQ ID NO: 1825 - protein, 16 aa, Artificial Sequence
  Non-cyclic GFR-binding peptide
  MOD_RES (14)..(15): Xaa is C or S
IFLVSIPSLQTPAXXP

SEQ ID NO: 1826 - protein, 10 aa, Artificial Sequence
  Non-cyclic GFR-binding peptide
IFLISIPSLD

SEQ ID NO: 1827 - protein, 15 aa, Artificial Sequence
  Non-cyclic GFR-binding peptide
  MOD_RES (14)..(15): Xaa is C or S
IFLISIPSLDQPVXX

SEQ ID NO: 1828 - protein, 19 aa, Artificial Sequence
  Non-cyclic GFR-binding peptide
  MOD_RES (14)..(15): Xaa is C or S
IFLVSIPSLKTPAXXPKPV

SEQ ID NO: 1829 - protein, 19 aa, Artificial Sequence
  Non-cyclic GFR-binding peptide
  MOD_RES (14)..(15): Xaa is C or S
YYLITLPELAQPVXXPAAS

SEQ ID NO: 1830 - protein, 14 aa, Artificial Sequence
  Non-cyclic GFR-binding peptide
  MOD_RES (14)..(14): Xaa is C or S
IFLISIPSLDQPVX

SEQ ID NO: 1831 - protein, 10 aa, Artificial Sequence
  Non-cyclic GFR-binding peptide
YYVVPLPELK

SEQ ID NO: 1832 - protein, 19 aa, Artificial Sequence
  Non-cyclic GFR-binding peptide
  MOD_RES (14)..(15): Xaa is C or S
YYVIPLPELRTPVXXTPPT

SEQ ID NO: 1833 - protein, 17 aa, Artificial Sequence
  Non-cyclic GFR-binding peptide
  MOD_RES (14)..(15): Xaa is C or S
YYLITLPELRTPVXXTP

SEQ ID NO: 1834 - protein, 10 aa, Artificial Sequence
  Non-cyclic GFR-binding peptide
YYVVPLPELQ

SEQ ID NO: 1835 - protein, 15 aa, Artificial Sequence
  Non-cyclic GFR-binding peptide
  MOD_RES (14)..(15): Xaa is C or S
IFLVSIPSLKTPAXX

SEQ ID NO: 1836 - protein, 12 aa, Artificial Sequence
  Non-cyclic GFR-binding peptide
YYVMPLPELETP

SEQ ID NO: 1837 - protein, 18 aa, Artificial Sequence
  Non-cyclic GFR-binding peptide
  MOD_RES (14)..(15): Xaa is C or S
YYVIPLPELRTPVXXTPP

SEQ ID NO: 1838 - protein, 18 aa, Artificial Sequence
  Non-cyclic GFR-binding peptide
  MOD_RES (14)..(15): Xaa is C or S
IFLVSIPSLKTPAXXPKP

SEQ ID NO: 1839 - protein, 18 aa, Artificial Sequence
  Non-cyclic GFR-binding peptide
  MOD_RES (14)..(15): Xaa is C or S
IFLVSIPSLQTPAXXPKP

SEQ ID NO: 1840 - protein, 15 aa, Artificial Sequence
  Non-cyclic GFR-binding peptide
  MOD_RES (14)..(15): Xaa is C or S
IFLVSIPSLQTPAXX

SEQ ID NO: 1841 - protein, 19 aa, Artificial Sequence
  Non-cyclic GFR-binding peptide
  MOD_RES (14)..(14): Xaa is C or S
IFLVSIPSLKTPAXTPKTV

SEQ ID NO: 1842 - protein, 16 aa, Artificial Sequence
  Non-cyclic GFR-binding peptide
  MOD_RES (14)..(15): Xaa is C or S
LYLISIASLRTPVXXT

SEQ ID NO: 1843 - protein, 12 aa, Artificial Sequence
  Non-cyclic GFR-binding peptide
IFLISIPSLAQP

SEQ ID NO: 1844 - protein, 18 aa, Artificial Sequence
  Non-cyclic GFR-binding peptide
  MOD_RES (14)..(14): Xaa is C or S
IFLVSIPSLKTPAXTPKT

SEQ ID NO: 1845 - protein, 19 aa, Artificial Sequence
  Non-cyclic GFR-binding peptide
  MOD_RES (14)..(15): Xaa is C or S
YYVMPLPELETPVXXAKPI

SEQ ID NO: 1846 - protein, 12 aa, Artificial Sequence
  Non-cyclic GFR-binding peptide
YYLVTLPELKTP

SEQ ID NO: 1847 - protein, 13 aa, Artificial Sequence
  Non-cyclic GFR-binding peptide
YYVIPLPELRTPV

SEQ ID NO: 1848 - protein, 12 aa, Artificial Sequence
  Non-cyclic GFR-binding peptide
IFLISIPSLDQP

SEQ ID NO: 1849 - protein, 20 aa, Artificial Sequence
  Non-cyclic GFR-binding peptide
  MOD_RES (14)..(15): Xaa is C or S
IFLMSIPSLETPVXXAKPIK

SEQ ID NO: 1850 - protein, 15 aa, Artificial Sequence
  Non-cyclic GFR-binding peptide
  MOD_RES (14)..(14): Xaa is C or S
YYLVTLPELKTPAXT

SEQ ID NO: 1851 - protein, 10 aa, Artificial Sequence
  Non-cyclic GFR-binding peptide
YYVMPLPELE

SEQ ID NO: 1852 - protein, 19 aa, Artificial Sequence
  Non-cyclic GFR-binding peptide
  MOD_RES (14)..(15): Xaa is C or S
YYVIPLPELDQSVXXPSAS

SEQ ID NO: 1853 - protein, 11 aa, Artificial Sequence
  Non-cyclic GFR-binding peptide
YYLITLPELRT

SEQ ID NO: 1854 - protein, 17 aa, Artificial Sequence
  Non-cyclic GFR-binding peptide
  MOD_RES (14)..(15): Xaa is C or S
IFLVSIPSLQTPAXXPK

SEQ ID NO: 1855 - protein, 18 aa, Artificial Sequence
  Non-cyclic GFR-binding peptide
  MOD_RES (14)..(15): Xaa is C or S
IFLISIPSLDQSVXXPSA

SEQ ID NO: 1856 - protein, 20 aa, Artificial Sequence
  Non-cyclic GFR-binding peptide
  MOD_RES (14)..(15): Xaa is C or S
YYVVPLPELKTPAXXPKPVY

SEQ ID NO: 1857 - protein, 11 aa, Artificial Sequence
  Non-cyclic GFR-binding peptide
IFLMSIPSLET

SEQ ID NO: 1858 - protein, 20 aa, Artificial Sequence
  Non-cyclic GFR-binding peptide
  MOD_RES (14)..(15): Xaa is C or S
YYLITLPELRTPVXXTPPTS

SEQ ID NO: 1859 - protein, 12 aa, Artificial Sequence
  Non-cyclic GFR-binding peptide
YYVVPLPELQTP

SEQ ID NO: 1860 - protein, 18 aa, Artificial Sequence
  Non-cyclic GFR-binding peptide
  MOD_RES (14)..(15): Xaa is C or S
YYLVTLPELKTPAXXPKP

SEQ ID NO: 1861 - protein, 18 aa, Artificial Sequence
  Non-cyclic GFR-binding peptide
  MOD_RES (14)..(15): Xaa is C or S
YYVMPLPELETPVXXAKP

SEQ ID NO: 1862 - protein, 18 aa, Artificial Sequence
  Non-cyclic GFR-binding peptide
  MOD_RES (14)..(15): Xaa is C or S
YYVIPLPELDQSVXXPSA

SEQ ID NO: 1863 - protein, 10 aa, Artificial Sequence
  Non-cyclic GFR-binding peptide
IFLVSIPSLK

SEQ ID NO: 1864 - protein, 10 aa, Artificial Sequence
  Non-cyclic GFR-binding peptide
LYLISIASLR

SEQ ID NO: 1865 - protein, 20 aa, Artificial Sequence
  Non-cyclic GFR-binding peptide
  MOD_RES (14)..(15): Xaa is C or S
IFLISIPSLAQPVXXPAASA

SEQ ID NO: 1866 - protein, 10 aa, Artificial Sequence
  Non-cyclic GFR-binding peptide
IFLMSIPSLE

SEQ ID NO: 1867 - protein, 13 aa, Artificial Sequence
  Non-cyclic GFR-binding peptide
YYLITLPELAQPV

SEQ ID NO: 1868 - protein, 17 aa, Artificial Sequence
  Non-cyclic GFR-binding peptide
  MOD_RES (14)..(15): Xaa is C or S
YYVIPLPELRTPVXXTP

SEQ ID NO: 1869 - protein, 13 aa, Artificial Sequence
  Non-cyclic GFR-binding peptide
YYLVTLPELQTPA

SEQ ID NO: 1870 - protein, 18 aa, Artificial Sequence
  Non-cyclic GFR-binding peptide
  MOD_RES (14)..(15): Xaa is C or S
YYLITLPELRTPVXXTPP

SEQ ID NO: 1871 - protein, 12 aa, Artificial Sequence
  Non-cyclic GFR-binding peptide
YYLVTLPELQTP

SEQ ID NO: 1872 - protein, 18 aa, Artificial Sequence
  Non-cyclic GFR-binding peptide
  MOD_RES (14)..(15): Xaa is C or S
YYVVPLPELKTPAXXPKP

SEQ ID NO: 1873 - protein, 11 aa, Artificial Sequence
  Non-cyclic GFR-binding peptide
LYLISIASLRT

SEQ ID NO: 1874 - protein, 11 aa, Artificial Sequence
  Non-cyclic GFR-binding peptide
IFLVSIPSLKT

SEQ ID NO: 1875 - protein, 13 aa, Artificial Sequence
  Non-cyclic GFR-binding peptide
YYLITLPELRTPV

SEQ ID NO: 1876 - protein, 11 aa, Artificial Sequence
  Non-cyclic GFR-binding peptide
YYVMPLPELET

SEQ ID NO: 1877 - protein, 20 aa, Artificial Sequence
  Non-cyclic GFR-binding peptide
  MOD_RES (14)..(15): Xaa is C or S
IFLISIPSLDQPVXXPSASA

SEQ ID NO: 1878 - protein, 17 aa, Artificial Sequence
  Non-cyclic GFR-binding peptide
  MOD_RES (14)..(15): Xaa is C or S
IFLVSIPSLKTPAXXPK

SEQ ID NO: 1879 - protein, 12 aa, Artificial Sequence
  Non-cyclic GFR-binding peptide
YYVIPLPELRTP

SEQ ID NO: 1880 - protein, 16 aa, Artificial Sequence
  Non-cyclic GFR-binding peptide
  MOD_RES (14)..(15): Xaa is C or S
YYLITLPELAQPVXXP

SEQ ID NO: 1881 - protein, 11 aa, Artificial Sequence
  Non-cyclic GFR-binding peptide
YYVIPLPELDQ

SEQ ID NO: 1882 - protein, 18 aa, Artificial Sequence
  Non-cyclic GFR-binding peptide
  MOD_RES (14)..(15): Xaa is C or S
YYLMTLPELETPVXXAKP

SEQ ID NO: 1883 - protein, 17 aa, Artificial Sequence
  Non-cyclic GFR-binding peptide
  MOD_RES (14)..(15): Xaa is C or S
IFLMSIPSLETPVXXAK

SEQ ID NO: 1884 - protein, 10 aa, Artificial Sequence
  Non-cyclic GFR-binding peptide
YYLMTLPELE

SEQ ID NO: 1885 - protein, 17 aa, Artificial Sequence
  Non-cyclic GFR-binding peptide
  MOD_RES (14)..(15): Xaa is C or S
IFLISIPSLAQPVXXPA

SEQ ID NO: 1886 - protein, 20 aa, Artificial Sequence
  Non-cyclic GFR-binding peptide
  MOD_RES (14)..(15): Xaa is C or S
YYVIPLPELDQPVXXPSASA

SEQ ID NO: 1887 - protein, 17 aa, Artificial Sequence
  Non-cyclic GFR-binding peptide
  MOD_RES (14)..(15): Xaa is C or S
YYVVPLPELKTPAXXPK

SEQ ID NO: 1888 - protein, 12 aa, Artificial Sequence
  Non-cyclic GFR-binding peptide
YYVIPLPELDQS

SEQ ID NO: 1889 - protein, 14 aa, Artificial Sequence
  Non-cyclic GFR-binding peptide
  MOD_RES (14)..(14): Xaa is C or S
FYLISIANLRTPVX

SEQ ID NO: 1890 - protein, 12 aa, Artificial Sequence
  Non-cyclic GFR-binding peptide
YYLITLPELRTP

SEQ ID NO: 1891 - protein, 14 aa, Artificial Sequence
  Non-cyclic GFR-binding peptide
  MOD_RES (14)..(14): Xaa is C or S
LYLISIASLRTPVX

SEQ ID NO: 1892 - protein, 11 aa, Artificial Sequence
  Non-cyclic GFR-binding peptide
YYLMTLPELET

SEQ ID NO: 1893 - protein, 19 aa, Artificial Sequence
  Non-cyclic GFR-binding peptide
  MOD_RES (14)..(15): Xaa is C or S
YYLITLPELRTPVXXTPPT

SEQ ID NO: 1894 - protein, 20 aa, Artificial Sequence
  Non-cyclic GFR-binding peptide
  MOD_RES (14)..(15): Xaa is C or S
YYVIPLPELRTPVXXTPPTS

SEQ ID NO: 1895 - protein, 11 aa, Artificial Sequence
  Non-cyclic GFR-binding peptide
IFLISIPSLDQ

SEQ ID NO: 1896 - protein, 18 aa, Artificial Sequence
  Non-cyclic GFR-binding peptide
  MOD_RES (14)..(15): Xaa is C or S
IFLMSIPSLETPVXXAKP

SEQ ID NO: 1897 - protein, 17 aa, Artificial Sequence
  Non-cyclic GFR-binding peptide
  MOD_RES (14)..(15): Xaa is C or S
YYVMPLPELETPVXXAK

SEQ ID NO: 1898 - protein, 18 aa, Artificial Sequence
  Non-cyclic GFR-binding peptide
  MOD_RES (14)..(15): Xaa is C or S
FYLISIANLRTPVXXTPP

SEQ ID NO: 1899 - protein, 11 aa, Artificial Sequence
  Non-cyclic GFR-binding peptide
YYLVTLPELKT

SEQ ID NO: 1900 - protein, 15 aa, Artificial Sequence
  Non-cyclic GFR-binding peptide
  MOD_RES (14)..(15): Xaa is C or S
YYVVPLPELQTPAXX

SEQ ID NO: 1901 - protein, 17 aa, Artificial Sequence
  Non-cyclic GFR-binding peptide
  MOD_RES (14)..(15): Xaa is C or S
YYLVTLPELKTPAXXPK

SEQ ID NO: 1902 - protein, 19 aa, Artificial Sequence
  Non-cyclic GFR-binding peptide
  MOD_RES (14)..(15): Xaa is C or S
IFLISIPSLDQSVXXPSAS

SEQ ID NO: 1903 - protein, 20 aa, Artificial Sequence
  Non-cyclic GFR-binding peptide
  MOD_RES (14)..(15): Xaa is C or S
YYLITLPELAQPVXXPAASA

SEQ ID NO: 1904 - protein, 10 aa, Artificial Sequence
  Non-cyclic GFR-binding peptide
IFLVSIPSLQ

SEQ ID NO: 1905 - protein, 14 aa, Artificial Sequence
  Non-cyclic GFR-binding peptide
  MOD_RES (14)..(14): Xaa is C or S
YYVIPLPELDQPVX

SEQ ID NO: 1906 - protein, 15 aa, Artificial Sequence
  Non-cyclic GFR-binding peptide
  MOD_RES (14)..(15): Xaa is C or S
IFLMSIPSLETPVXX

SEQ ID NO: 1907 - protein, 18 aa, Artificial Sequence
  Non-cyclic GFR-binding peptide
  MOD_RES (14)..(15): Xaa is C or S
YYLVTLPELQTPAXXPKP

SEQ ID NO: 1908 - protein, 20 aa, Artificial Sequence
  Non-cyclic GFR-binding peptide
  MOD_RES (14)..(15): Xaa is C or S
YYVVPLPELQTPAXXPKPVT

SEQ ID NO: 1909 - protein, 16 aa, Artificial Sequence
  Non-cyclic GFR-binding peptide
  MOD_RES (14)..(15): Xaa is C or S
YYVVPLPELQTPAXXP

SEQ ID NO: 1910 - protein, 17 aa, Artificial Sequence
  Non-cyclic GFR-binding peptide
  MOD_RES (14)..(15): Xaa is C or S
LYLISIASLRTPVXXTP

SEQ ID NO: 1911 - protein, 19 aa, Artificial Sequence
  Non-cyclic GFR-binding peptide
  MOD_RES (14)..(15): Xaa is C or S
FYLISIANLRTPVXXTPPT

SEQ ID NO: 1912 - protein, 18 aa, Artificial Sequence
  Non-cyclic GFR-binding peptide
  MOD_RES (14)..(15): Xaa is C or S
YYLITLPELAQPVXXPAA

SEQ ID NO: 1913 - protein, 11 aa, Artificial Sequence
  Non-cyclic GFR-binding peptide
YYVVPLPELKT

SEQ ID NO: 1914 - protein, 19 aa, Artificial Sequence
  Non-cyclic GFR-binding peptide
  MOD_RES (14)..(15): Xaa is C or S
YYVVPLPELQTPAXXPKPV

SEQ ID NO: 1915 - protein, 20 aa, Artificial Sequence
  Non-cyclic GFR-binding peptide
  MOD_RES (14)..(15): Xaa is C or S
FYLISIANLRTPVXXTPPTS

SEQ ID NO: 1916 - protein, 15 aa, Artificial Sequence
  Non-cyclic GFR-binding peptide
  MOD_RES (14)..(15): Xaa is C or S
YYLVTLPELQTPAXX

SEQ ID NO: 1917 - protein, 13 aa, Artificial Sequence
  Non-cyclic GFR-binding peptide
FYLISIANLRTPV

SEQ ID NO: 1918 - protein, 17 aa, Artificial Sequence
  Non-cyclic GFR-binding peptide
  MOD_RES (14)..(15): Xaa is C or S
IFLISIPSLDQPVXXPS

SEQ ID NO: 1919 - protein, 16 aa, Artificial Sequence
  Non-cyclic GFR-binding peptide
  MOD_RES (14)..(15): Xaa is C or S
IFLISIPSLAQPVXXP

SEQ ID NO: 1920 - protein, 18 aa, Artificial Sequence
  Non-cyclic GFR-binding peptide
  MOD_RES (14)..(15): Xaa is C or S
YYVIPLPELDQPVXXPSA

SEQ ID NO: 1921 - protein, 12 aa, Artificial Sequence
  Non-cyclic GFR-binding peptide
IFLVSIPSLQTP

SEQ ID NO: 1922 - protein, 15 aa, Artificial Sequence
  Non-cyclic GFR-binding peptide
  MOD_RES (14)..(15): Xaa is C or S
LYLISIASLRTPVXX

SEQ ID NO: 1923 - protein, 12 aa, Artificial Sequence
  Non-cyclic GFR-binding peptide
IFLVSIPSLKTP

SEQ ID NO: 1924 - protein, 12 aa, Artificial Sequence
  Non-cyclic GFR-binding peptide
YYLITLPELAQP

SEQ ID NO: 1925 - protein, 15 aa, Artificial Sequence
  Non-cyclic GFR-binding peptide
  MOD_RES (14)..(15): Xaa is C or S
FYLISIANLRTPVXX

SEQ ID NO: 1926 - protein, 18 aa, Artificial Sequence
  Non-cyclic GFR-binding peptide
  MOD_RES (14)..(14): Xaa is C or S
YYVVPLPELKTPAXTPKT

SEQ ID NO: 1927 - protein, 11 aa, Artificial Sequence
  Non-cyclic GFR-binding peptide
FYLISIANLRT

SEQ ID NO: 1928 - protein, 15 aa, Artificial Sequence
  Non-cyclic GFR-binding peptide
  MOD_RES (14)..(15): Xaa is C or S
YYLITLPELAQPVXX

SEQ ID NO: 1929 - protein, 13 aa, Artificial Sequence
  Non-cyclic GFR-binding peptide
YYLVTLPELKTPA

SEQ ID NO: 1930 - protein, 20 aa, Artificial Sequence
  Non-cyclic GFR-binding peptide
  MOD_RES (14)..(15): Xaa is C or S
YYVMPLPELETPVXXAKPIK

SEQ ID NO: 1931 - protein, 10 aa, Artificial Sequence
  Non-cyclic GFR-binding peptide
YYLITLPELA

SEQ ID NO: 1932 - protein, 14 aa, Artificial Sequence
  Non-cyclic GFR-binding peptide
  MOD_RES (14)..(14): Xaa is C or S
YYLITLPELAQPVX

SEQ ID NO: 1933 - protein, 17 aa, Artificial Sequence
  Non-cyclic GFR-binding peptide
  MOD_RES (14)..(15): Xaa is C or S
IFLISIPSLDQSVXXPS

SEQ ID NO: 1934 - protein, 15 aa, Artificial Sequence
  Non-cyclic GFR-binding peptide
  MOD_RES (14)..(15): Xaa is C or S
YYLVTLPELKTPAXX

SEQ ID NO: 1935 - protein, 20 aa, Artificial Sequence
  Non-cyclic GFR-binding peptide
  MOD_RES (14)..(14): Xaa is C or S
YYLVTLPELKTPAXTPKTVH

SEQ ID NO: 1936 - protein, 12 aa, Artificial Sequence
  Non-cyclic GFR-binding peptide
YYVIPLPELDQP

SEQ ID NO: 1937 - protein, 14 aa, Artificial Sequence
  Non-cyclic GFR-binding peptide
  MOD_RES (14)..(14): Xaa is C or S
YYVVPLPELKTPAX

SEQ ID NO: 1938 - protein, 16 aa, Artificial Sequence
  Non-cyclic GFR-binding peptide
  MOD_RES (14)..(15): Xaa is C or S
YYVIPLPELRTPVXXT

SEQ ID NO: 1939 - protein, 18 aa, Artificial Sequence
  Non-cyclic GFR-binding peptide
  MOD_RES (14)..(15): Xaa is C or S
YYVVPLPELQTPAXXPKP

SEQ ID NO: 1940 - protein, 16 aa, Artificial Sequence
  Non-cyclic GFR-binding peptide
  MOD_RES (14)..(15): Xaa is C or S
YYLVTLPELQTPAXXP

SEQ ID NO: 1941 - protein, 17 aa, Artificial Sequence
  Non-cyclic GFR-binding peptide
  MOD_RES (14)..(15): Xaa is C or S
FYLISIANLRTPVXXTP

SEQ ID NO: 1942 - protein, 19 aa, Artificial Sequence
  Non-cyclic GFR-binding peptide
  MOD_RES (14)..(14): Xaa is C or S
YYVVPLPELKTPAXTPKTV

SEQ ID NO: 1943 - protein, 16 aa, Artificial Sequence
  Non-cyclic GFR-binding peptide
  MOD_RES (14)..(15): Xaa is C or S
IFLISIPSLDQSVXXP

SEQ ID NO: 1944 - protein, 13 aa, Artificial Sequence
  Non-cyclic GFR-binding peptide
YYVVPLPELQTPA

SEQ ID NO: 1945 - protein, 16 aa, Artificial Sequence
  Non-cyclic GFR-binding peptide
  MOD_RES (14)..(15): Xaa is C or S
YYVMPLPELETPVXXA

SEQ ID NO: 1946 - protein, 12 aa, Artificial Sequence
  Non-cyclic GFR-binding peptide
IFLMSIPSLETP

SEQ ID NO: 1947 - protein, 18 aa, Artificial Sequence
  Non-cyclic GFR-binding peptide
  MOD_RES (14)..(15): Xaa is C or S
LYLISIASLRTPVXXTPP

SEQ ID NO: 1948 - protein, 14 aa, Artificial Sequence
  Non-cyclic GFR-binding peptide
  MOD_RES (14)..(14): Xaa is C or S
IFLMSIPSLETPVX

SEQ ID NO: 1949 - protein, 13 aa, Artificial Sequence
  Non-cyclic GFR-binding peptide
APTKLSPISVLFI

SEQ ID NO: 1950 - protein, 14 aa, Artificial Sequence
  Non-cyclic GFR-binding peptide
  MOD_RES (1)..(1): Xaa is C or S
XVPQALSPISILFI

SEQ ID NO: 1951 - protein, 20 aa, Artificial Sequence
  Non-cyclic GFR-binding peptide
  MOD_RES (7)..(7): Xaa is C or S
HVTKPTXAPTKLSPISVLFI

SEQ ID NO: 1952 - protein, 11 aa, Artificial Sequence
  Non-cyclic GFR-binding peptide
TQLEPLTVLYY

SEQ ID NO: 1953 - protein, 13 aa, Artificial Sequence
  Non-cyclic GFR-binding peptide
VPQDLEPLPIVYY

SEQ ID NO: 1954 - protein, 19 aa, Artificial Sequence
  Non-cyclic GFR-binding peptide
  MOD_RES (5)..(6): Xaa is C or S
VPKPXXAPTKLEPLTVLYY

SEQ ID NO: 1955 - protein, 17 aa, Artificial Sequence
  Non-cyclic GFR-binding peptide
  MOD_RES (3)..(4): Xaa is C or S
KPXXAPTQLEPLTVLYY

SEQ ID NO: 1956 - protein, 18 aa, Artificial Sequence
  Non-cyclic GFR-binding peptide
  MOD_RES (5)..(5): Xaa is C or S
TKPTXAPTKLEPLTVLYY

SEQ ID NO: 1957 - protein, 16 aa, Artificial Sequence
  Non-cyclic GFR-binding peptide
  MOD_RES (2)..(3): Xaa is C or S
PXXAPTKLEPLPVVYY

SEQ ID NO: 1958 - protein, 16 aa, Artificial Sequence
  Non-cyclic GFR-binding peptide
  MOD_RES (3)..(3): Xaa is C or S
PTXAPTKLEPLTVLYY

SEQ ID NO: 1959 - protein, 13 aa, Artificial Sequence
  Non-cyclic GFR-binding peptide
VPTRLSAISILYL

SEQ ID NO: 1960 - protein, 19 aa, Artificial Sequence
  Non-cyclic GFR-binding peptide
  MOD_RES (5)..(6): Xaa is C or S
SASPXXVPQDLSPISILFI

SEQ ID NO: 1961 - protein, 9 aa, Artificial Sequence
  Non-cyclic GFR-binding peptide
LEPLPVVYY

SEQ ID NO: 1962 - protein, 20 aa, Artificial Sequence
  Non-cyclic GFR-binding peptide
  MOD_RES (6)..(7): Xaa is C or S
YVPKPXXAPTKLSPISVLFI

SEQ ID NO: 1963 - protein, 16 aa, Artificial Sequence
  Non-cyclic GFR-binding peptide
  MOD_RES (2)..(3): Xaa is C or S
AXXVPTELSPISMLFI

SEQ ID NO: 1964 - protein, 20 aa, Artificial Sequence
  Non-cyclic GFR-binding peptide
  MOD_RES (6)..(7): Xaa is C or S
SIPKAXXVPTELSPISMLFI

SEQ ID NO: 1965 - protein, 10 aa, Artificial Sequence
  Non-cyclic GFR-binding peptide
DLEPLPIVYY

SEQ ID NO: 1966 - protein, 13 aa, Artificial Sequence
  Non-cyclic GFR-binding peptide
VPTELEPLTMLYY

SEQ ID NO: 1967 - protein, 11 aa, Artificial Sequence
  Non-cyclic GFR-binding peptide
TRLEPLPIVYY

SEQ ID NO: 1968 - protein, 19 aa, Artificial Sequence
  Non-cyclic GFR-binding peptide
  MOD_RES (5)..(6): Xaa is C or S
VPKPXXAPTKLEPLPVVYY

SEQ ID NO: 1969 - protein, 15 aa, Artificial Sequence
  Non-cyclic GFR-binding peptide
  MOD_RES (1)..(2): Xaa is C or S
XXVPTELEPLTMLYY

SEQ ID NO: 1970 - protein, 9 aa, Artificial Sequence
  Non-cyclic GFR-binding peptide
LSPISMLFI

SEQ ID NO: 1971 - protein, 15 aa, Artificial Sequence
  Non-cyclic GFR-binding peptide
  MOD_RES (1)..(2): Xaa is C or S
XXVSQDLSPISILFI

SEQ ID NO: 1972 - protein, 16 aa, Artificial Sequence
  Non-cyclic GFR-binding peptide
  MOD_RES (2)..(3): Xaa is C or S
PXXVPQDLEPLPIVYY

SEQ ID NO: 1973 - protein, 11 aa, Artificial Sequence
  Non-cyclic GFR-binding peptide
TQLEPLPVVYY

SEQ ID NO: 1974 - protein, 17 aa, Artificial Sequence
  Non-cyclic GFR-binding peptide
  MOD_RES (4)..(4): Xaa is C or S
KPTXAPTKLSPISVLFI

SEQ ID NO: 1975 - protein, 20 aa, Artificial Sequence
  Non-cyclic GFR-binding peptide
  MOD_RES (6)..(7): Xaa is C or S
ASASPXXVSQDLEPLPIVYY

SEQ ID NO: 1976 - protein, 20 aa, Artificial Sequence
  Non-cyclic GFR-binding peptide
  MOD_RES (6)..(7): Xaa is C or S
STPPTXXVPTRLSAISILYL

SEQ ID NO: 1977 - protein, 17 aa, Artificial Sequence
  Non-cyclic GFR-binding peptide
  MOD_RES (3)..(4): Xaa is C or S
KPXXAPTQLEPLPVVYY

SEQ ID NO: 1978 - protein, 14 aa, Artificial Sequence
  Non-cyclic GFR-binding peptide
  MOD_RES (1)..(1): Xaa is C or S
XAPTQLEPLPVVYY

SEQ ID NO: 1979 - protein, 17 aa, Artificial Sequence
  Non-cyclic GFR-binding peptide
  MOD_RES (4)..(4): Xaa is C or S
KPTXAPTKLEPLPVVYY

SEQ ID NO: 1980 - protein, 19 aa, Artificial Sequence
  Non-cyclic GFR-binding peptide
  MOD_RES (5)..(6): Xaa is C or S
IPKAXXVPTELSPISMLFI

SEQ ID NO: 1981 - protein, 10 aa, Artificial Sequence
  Non-cyclic GFR-binding peptide
RLEPLTILYY

SEQ ID NO: 1982 - protein, 16 aa, Artificial Sequence
  Non-cyclic GFR-binding peptide
  MOD_RES (3)..(3): Xaa is C or S
PTXAPTKLEPLPVVYY

SEQ ID NO: 1983 - protein, 19 aa, Artificial Sequence
  Non-cyclic GFR-binding peptide
  MOD_RES (5)..(6): Xaa is C or S
TPPTXXVPTRLSAISILYL

SEQ ID NO: 1984 - protein, 16 aa, Artificial Sequence
  Non-cyclic GFR-binding peptide
  MOD_RES (2)..(3): Xaa is C or S
PXXAPTKLEPLTVLYY

SEQ ID NO: 1985 - protein, 17 aa, Artificial Sequence
  Non-cyclic GFR-binding peptide
  MOD_RES (3)..(4): Xaa is C or S
SPXXVSQDLEPLPIVYY

SEQ ID NO: 1986 - protein, 19 aa, Artificial Sequence
  Non-cyclic GFR-binding peptide
  MOD_RES (5)..(6): Xaa is C or S
SAAPXXVPQALSPISILFI

SEQ ID NO: 1987 - protein, 14 aa, Artificial Sequence
  Non-cyclic GFR-binding peptide
  MOD_RES (1)..(1): Xaa is C or S
XVPTRLEPLPIVYY

SEQ ID NO: 1988 - protein, 20 aa, Artificial Sequence
  Non-cyclic GFR-binding peptide
  MOD_RES (6)..(7): Xaa is C or S
KIPKAXXVPTELEPLTMLYY

SEQ ID NO: 1989 - protein, 15 aa, Artificial Sequence
  Non-cyclic GFR-binding peptide
  MOD_RES (1)..(2): Xaa is C or S
XXAPTKLEPLPVVYY

SEQ ID NO: 1990 - protein, 15 aa, Artificial Sequence
  Non-cyclic GFR-binding peptide
  MOD_RES (2)..(2): Xaa is C or S
TXAPTKLSPISVLFI

SEQ ID NO: 1991 - protein, 13 aa, Artificial Sequence
  Non-cyclic GFR-binding peptide
VPQDLSPISILFI

SEQ ID NO: 1992 - protein, 13 aa, Artificial Sequence
  Non-cyclic GFR-binding peptide
APTKLEPLPVVYY

SEQ ID NO: 1993 - protein, 13 aa, Artificial Sequence
  Non-cyclic GFR-binding peptide
VPTELSPISMLFI

SEQ ID NO: 1994 - protein, 10 aa, Artificial Sequence
  Non-cyclic GFR-binding peptide
RLEPLPIVYY

SEQ ID NO: 1995 - protein, 20 aa, Artificial Sequence
  Non-cyclic GFR-binding peptide
  MOD_RES (6)..(7): Xaa is C or S
SIPKAXXVPTELEPLPMVYY

SEQ ID NO: 1996 - protein, 16 aa, Artificial Sequence
  Non-cyclic GFR-binding peptide
  MOD_RES (2)..(3): Xaa is C or S
TXXVPTRLEPLTILYY

SEQ ID NO: 1997 - protein, 12 aa, Artificial Sequence
  Non-cyclic GFR-binding peptide
PTRLSAISILYL

SEQ ID NO: 1998 - protein, 14 aa, Artificial Sequence
  Non-cyclic GFR-binding peptide
  MOD_RES (1)..(1): Xaa is C or S
XVPTRLEPLTILYY

SEQ ID NO: 1999 - protein, 14 aa, Artificial Sequence
  Non-cyclic GFR-binding peptide
  MOD_RES (1)..(1): Xaa is C or S
XAPTKLEPLTVLYY

SEQ ID NO: 2000 - protein, 16 aa, Artificial Sequence
  Non-cyclic GFR-binding peptide
  MOD_RES (3)..(3): Xaa is C or S
PTXAPTKLSPISVLFI

SEQ ID NO: 2001 - protein, 17 aa, Artificial Sequence
  Non-cyclic GFR-binding peptide
  MOD_RES (4)..(4): Xaa is C or S
KPTXAPTKLEPLTVLYY

SEQ ID NO: 2002 - protein, 14 aa, Artificial Sequence
  Non-cyclic GFR-binding peptide
  MOD_RES (1)..(1): Xaa is C or S
XVSQDLSPISILFI

SEQ ID NO: 2003 - protein, 19 aa, Artificial Sequence
  Non-cyclic GFR-binding peptide
  MOD_RES (6)..(6): Xaa is C or S
VTKPTXAPTKLEPLTVLYY

SEQ ID NO: 2004 - protein, 9 aa, Artificial Sequence
  Non-cyclic GFR-binding peptide
LSPISVLFI

SEQ ID NO: 2005 - protein, 15 aa, Artificial Sequence
  Non-cyclic GFR-binding peptide
  MOD_RES (2)..(2): Xaa is C or S
TXAPTKLEPLPVVYY

SEQ ID NO: 2006 - protein, 16 aa, Artificial Sequence
  Non-cyclic GFR-binding peptide
  MOD_RES (2)..(3): Xaa is C or S
AXXVPTELEPLTMLYY

SEQ ID NO: 2007 - protein, 11 aa, Artificial Sequence
  Non-cyclic GFR-binding peptide
QALSPISILFI

SEQ ID NO: 2008 - protein, 20 aa, Artificial Sequence
  Non-cyclic GFR-binding peptide
  MOD_RES (6)..(7): Xaa is C or S
ASASPXXVSQDLSPISILFI

SEQ ID NO: 2009 - protein, 15 aa, Artificial Sequence
  Non-cyclic GFR-binding peptide
  MOD_RES (1)..(2): Xaa is C or S
XXVPQDLEPLPIVYY

SEQ ID NO: 2010 - protein, 14 aa, Artificial Sequence
  Non-cyclic GFR-binding peptide
  MOD_RES (1)..(1): Xaa is C or S
XAPTQLEPLTVLYY

SEQ ID NO: 2011 - protein, 13 aa, Artificial Sequence
  Non-cyclic GFR-binding peptide
VSQDLSPISILFI

SEQ ID NO: 2012 - protein, 18 aa, Artificial Sequence
  Non-cyclic GFR-binding peptide
  MOD_RES (4)..(5): Xaa is C or S
ASPXXVPQDLSPISILFI

SEQ ID NO: 2013 - protein, 20 aa, Artificial Sequence
  Non-cyclic GFR-binding peptide
  MOD_RES (7)..(7): Xaa is C or S
HVTKPTXAPTKLEPLPVVYY

SEQ ID NO: 2014 - protein, 19 aa, Artificial Sequence
  Non-cyclic GFR-binding peptide
  MOD_RES (5)..(6): Xaa is C or S
IPKAXXVPTELEPLTMLYY

SEQ ID NO: 2015 - protein, 15 aa, Artificial Sequence
  Non-cyclic GFR-binding peptide
  MOD_RES (1)..(2): Xaa is C or S
XXVPQALSPISILFI

SEQ ID NO: 2016 - protein, 16 aa, Artificial Sequence
  Non-cyclic GFR-binding peptide
  MOD_RES (2)..(3): Xaa is C or S
PXXVPQDLSPISILFI

SEQ ID NO: 2017 - protein, 17 aa, Artificial Sequence
  Non-cyclic GFR-binding peptide
  MOD_RES (3)..(4): Xaa is C or S
KAXXVPTELEPLTMLYY

SEQ ID NO: 2018 - protein, 16 aa, Artificial Sequence
  Non-cyclic GFR-binding peptide
  MOD_RES (2)..(3): Xaa is C or S
PXXAPTKLSPISVLFI

SEQ ID NO: 2019 - protein, 17 aa, Artificial Sequence
  Non-cyclic GFR-binding peptide
  MOD_RES (3)..(4): Xaa is C or S
APXXVPQALEPLTILYY

SEQ ID NO: 2020 - protein, 10 aa, Artificial Sequence
  Non-cyclic GFR-binding peptide
QLEPLTVLYY

SEQ ID NO: 2021 - protein, 19 aa, Artificial Sequence
  Non-cyclic GFR-binding peptide
  MOD_RES (5)..(6): Xaa is C or S
SASPXXVPQDLEPLPIVYY

SEQ ID NO: 2022 - protein, 11 aa, Artificial Sequence
  Non-cyclic GFR-binding peptide
QALEPLTILYY

SEQ ID NO: 2023 - protein, 14 aa, Artificial Sequence
  Non-cyclic GFR-binding peptide
  MOD_RES (1)..(1): Xaa is C or S
XAPTQLSPISVLFI

SEQ ID NO: 2024 - protein, 19 aa, Artificial Sequence
  Non-cyclic GFR-binding peptide
  MOD_RES (5)..(6): Xaa is C or S
VPKPXXAPTQLSPISVLFI

SEQ ID NO: 2025 - protein, 12 aa, Artificial Sequence
  Non-cyclic GFR-binding peptide
PTRLNAISILYF

SEQ ID NO: 2026 - protein, 20 aa, Artificial Sequence
  Non-cyclic GFR-binding peptide
  MOD_RES (6)..(7): Xaa is C or S
TVPKPXXAPTQLSPISVLFI

SEQ ID NO: 2027 - protein, 9 aa, Artificial Sequence
  Non-cyclic GFR-binding peptide
LEPLPMVYY

SEQ ID NO: 2028 - protein, 14 aa, Artificial Sequence
  Non-cyclic GFR-binding peptide
  MOD_RES (1)..(1): Xaa is C or S
XVSQDLEPLPIVYY

SEQ ID NO: 2029 - protein, 13 aa, Artificial Sequence
  Non-cyclic GFR-binding peptide
VPTELEPLPMVYY

SEQ ID NO: 2030 - protein, 11 aa, Artificial Sequence
  Non-cyclic GFR-binding peptide
TQLSPISVLFI

SEQ ID NO: 2031 - protein, 18 aa, Artificial Sequence
  Non-cyclic GFR-binding peptide
  MOD_RES (4)..(5): Xaa is C or S
AAPXXVPQALSPISILFI

SEQ ID NO: 2032 - protein, 15 aa, Artificial Sequence
  Non-cyclic GFR-binding peptide
  MOD_RES (1)..(2): Xaa is C or S
XXVPTELEPLPMVYY

SEQ ID NO: 2033 - protein, 9 aa, Artificial Sequence
  Non-cyclic GFR-binding peptide
LEPLTVLYY

SEQ ID NO: 2034 - protein, 13 aa, Artificial Sequence
  Non-cyclic GFR-binding peptide
APTQLSPISVLFI

SEQ ID NO: 2035 - protein, 13 aa, Artificial Sequence
  Non-cyclic GFR-binding peptide
VSQDLEPLPIVYY

SEQ ID NO: 2036 - protein, 19 aa, Artificial Sequence
  Non-cyclic GFR-binding peptide
  MOD_RES (5)..(6): Xaa is C or S
VPKPXXAPTQLEPLTVLYY

SEQ ID NO: 2037 - protein, 14 aa, Artificial Sequence
  Non-cyclic GFR-binding peptide
  MOD_RES (1)..(1): Xaa is C or S
XVPTELEPLTMLYY

SEQ ID NO: 2038 - protein, 10 aa, Artificial Sequence
  Non-cyclic GFR-binding peptide
ALSPISILFI

SEQ ID NO: 2039 - protein, 15 aa, Artificial Sequence
  Non-cyclic GFR-binding peptide
  MOD_RES (1)..(2): Xaa is C or S
XXVPTRLEPLPIVYY

SEQ ID NO: 2040 - protein, 20 aa, Artificial Sequence
  Non-cyclic GFR-binding peptide
  MOD_RES (6)..(7): Xaa is C or S
YVPKPXXAPTKLEPLTVLYY

SEQ ID NO: 2041 - protein, 14 aa, Artificial Sequence
  Non-cyclic GFR-binding peptide
  MOD_RES (1)..(1): Xaa is C or S
XVPTELEPLPMVYY

SEQ ID NO: 2042 - protein, 17 aa, Artificial Sequence
  Non-cyclic GFR-binding peptide
  MOD_RES (3)..(4): Xaa is C or S
SPXXVPQDLEPLPIVYY

SEQ ID NO: 2043 - protein, 13 aa, Artificial Sequence
  Non-cyclic GFR-binding peptide
VPQALSPISILFI

SEQ ID NO: 2044 - protein, 16 aa, Artificial Sequence
  Non-cyclic GFR-binding peptide
  MOD_RES (2)..(3): Xaa is C or S
PXXVSQDLEPLPIVYY

SEQ ID NO: 2045 - protein, 20 aa, Artificial Sequence
  Non-cyclic GFR-binding peptide
  MOD_RES (6)..(7): Xaa is C or S
SIPKAXXVPTELEPLTMLYY

SEQ ID NO: 2046 - protein, 12 aa, Artificial Sequence
  Non-cyclic GFR-binding peptide
SQDLSPISILFI

SEQ ID NO: 2047 - protein, 16 aa, Artificial Sequence
  Non-cyclic GFR-binding peptide
  MOD_RES (2)..(3): Xaa is C or S
TXXVPTRLNAISILYF

SEQ ID NO: 2048 - protein, 9 aa, Artificial Sequence
  Non-cyclic GFR-binding peptide
LEPLTMLYY

SEQ ID NO: 2049 - protein, 10 aa, Artificial Sequence
  Non-cyclic GFR-binding peptide
KLEPLTVLYY

SEQ ID NO: 2050 - protein, 15 aa, Artificial Sequence
  Non-cyclic GFR-binding peptide
  MOD_RES (1)..(2): Xaa is C or S
XXVSQDLEPLPIVYY

SEQ ID NO: 2051 - protein, 12 aa, Artificial Sequence
  Non-cyclic GFR-binding peptide
PTELEPLTMLYY

SEQ ID NO: 2052 - protein, 20 aa, Artificial Sequence
  Non-cyclic GFR-binding peptide
  MOD_RES (6)..(7): Xaa is C or S
TVPKPXXAPTQLEPLTVLYY

SEQ ID NO: 2053 - protein, 14 aa, Artificial Sequence
  Non-cyclic GFR-binding peptide
  MOD_RES (1)..(1): Xaa is C or S
XAPTKLSPISVLFI

SEQ ID NO: 2054 - protein, 10 aa, Artificial Sequence
  Non-cyclic GFR-binding peptide
RLNAISILYF

SEQ ID NO: 2055 - protein, 12 aa, Artificial Sequence
  Non-cyclic GFR-binding peptide
PTKLEPLPVVYY

SEQ ID NO: 2056 - protein, 15 aa, Artificial Sequence
  Non-cyclic GFR-binding peptide
  MOD_RES (1)..(2): Xaa is C or S
XXVPTRLEPLTILYY

SEQ ID NO: 2057 - protein, 16 aa, Artificial Sequence
  Non-cyclic GFR-binding peptide
  MOD_RES (2)..(3): Xaa is C or S
PXXAPTQLSPISVLFI

SEQ ID NO: 2058 - protein, 10 aa, Artificial Sequence
  Non-cyclic GFR-binding peptide
DLSPISILFI

SEQ ID NO: 2059 - protein, 15 aa, Artificial Sequence
  Non-cyclic GFR-binding peptide
  MOD_RES (1)..(2): Xaa is C or S
XXVPQDLSPISILFI

SEQ ID NO: 2060 - protein, 19 aa, Artificial Sequence
  Non-cyclic GFR-binding peptide
  MOD_RES (5)..(6): Xaa is C or S
VPKPXXAPTKLSPISVLFI

SEQ ID NO: 2061 - protein, 19 aa, Artificial Sequence
  Non-cyclic GFR-binding peptide
  MOD_RES (5)..(6): Xaa is C or S
SAAPXXVPQALEPLTILYY

SEQ ID NO: 2062 - protein, 14 aa, Artificial Sequence
  Non-cyclic GFR-binding peptide
  MOD_RES (1)..(1): Xaa is C or S
XVPQDLSPISILFI

SEQ ID NO: 2063 - protein, 10 aa, Artificial Sequence
  Non-cyclic GFR-binding peptide
KLEPLPVVYY

SEQ ID NO: 2064 - protein, 19 aa, Artificial Sequence
  Non-cyclic GFR-binding peptide
  MOD_RES (5)..(6): Xaa is C or S
TPPTXXVPTRLEPLPIVYY

SEQ ID NO: 2065 - protein, 17 aa, Artificial Sequence
  Non-cyclic GFR-binding peptide
  MOD_RES (3)..(4): Xaa is C or S
PTXXVPTRLEPLTILYY

SEQ ID NO: 2066 - protein, 10 aa, Artificial Sequence
  Non-cyclic GFR-binding peptide
QLEPLPVVYY

SEQ ID NO: 2067 - protein, 15 aa, Artificial Sequence
  Non-cyclic GFR-binding peptide
  MOD_RES (1)..(2): Xaa is C or S
XXAPTKLSPISVLFI

SEQ ID NO: 2068 - protein, 12 aa, Artificial Sequence
  Non-cyclic GFR-binding peptide
PTELEPLPMVYY

SEQ ID NO: 2069 - protein, 18 aa, Artificial Sequence
  Non-cyclic GFR-binding peptide
  MOD_RES (4)..(5): Xaa is C or S
PPTXXVPTRLEPLPIVYY

SEQ ID NO: 2070 - protein, 18 aa, Artificial Sequence
  Non-cyclic GFR-binding peptide
  MOD_RES (4)..(5): Xaa is C or S
PKPXXAPTKLSPISVLFI

SEQ ID NO: 2071 - protein, 18 aa, Artificial Sequence
  Non-cyclic GFR-binding peptide
  MOD_RES (4)..(5): Xaa is C or S
PKPXXAPTQLSPISVLFI

SEQ ID NO: 2072 - protein, 15 aa, Artificial Sequence
  Non-cyclic GFR-binding peptide
  MOD_RES (1)..(2): Xaa is C or S
XXAPTQLSPISVLFI

SEQ ID NO: 2073 - protein, 19 aa, Artificial Sequence
  Non-cyclic GFR-binding peptide
  MOD_RES (6)..(6): Xaa is C or S
VTKPTXAPTKLSPISVLFI

SEQ ID NO: 2074 - protein, 16 aa, Artificial Sequence
  Non-cyclic GFR-binding peptide
  MOD_RES (2)..(3): Xaa is C or S
TXXVPTRLSAISILYL

SEQ ID NO: 2075 - protein, 12 aa, Artificial Sequence
  Non-cyclic GFR-binding peptide
PQALSPISILFI

SEQ ID NO: 2076 - protein, 18 aa, Artificial Sequence
  Non-cyclic GFR-binding peptide
  MOD_RES (5)..(5): Xaa is C or S
TKPTXAPTKLSPISVLFI

SEQ ID NO: 2077 - protein, 19 aa, Artificial Sequence
  Non-cyclic GFR-binding peptide
  MOD_RES (5)..(6): Xaa is C or S
IPKAXXVPTELEPLPMVYY

SEQ ID NO: 2078 - protein, 12 aa, Artificial Sequence
  Non-cyclic GFR-binding peptide
PTKLEPLTVLYY

SEQ ID NO: 2079 - protein, 13 aa, Artificial Sequence
  Non-cyclic GFR-binding peptide
VPTRLEPLPIVYY

SEQ ID NO: 2080 - protein, 12 aa, Artificial Sequence
  Non-cyclic GFR-binding peptide
PQDLSPISILFI

SEQ ID NO: 2081 - protein, 20 aa, Artificial Sequence
  Non-cyclic GFR-binding peptide
  MOD_RES (6)..(7): Xaa is C or S
KIPKAXXVPTELSPISMLFI

SEQ ID NO: 2082 - protein, 15 aa, Artificial Sequence
  Non-cyclic GFR-binding peptide
  MOD_RES (2)..(2): Xaa is C or S
TXAPTKLEPLTVLYY

SEQ ID NO: 2083 - protein, 10 aa, Artificial Sequence
  Non-cyclic GFR-binding peptide
ELEPLPMVYY

SEQ ID NO: 2084 - protein, 19 aa, Artificial Sequence
  Non-cyclic GFR-binding peptide
  MOD_RES (5)..(6): Xaa is C or S
SASPXXVSQDLEPLPIVYY

SEQ ID NO: 2085 - protein, 11 aa, Artificial Sequence
  Non-cyclic GFR-binding peptide
TRLEPLTILYY

SEQ ID NO: 2086 - protein, 17 aa, Artificial Sequence
  Non-cyclic GFR-binding peptide
  MOD_RES (3)..(4): Xaa is C or S
KPXXAPTQLSPISVLFI

SEQ ID NO: 2087 - protein, 18 aa, Artificial Sequence
  Non-cyclic GFR-binding peptide
  MOD_RES (4)..(5): Xaa is C or S
ASPXXVSQDLSPISILFI

SEQ ID NO: 2088 - protein, 20 aa, Artificial Sequence
  Non-cyclic GFR-binding peptide
  MOD_RES (6)..(7): Xaa is C or S
YVPKPXXAPTKLEPLPVVYY

SEQ ID NO: 2089 - protein, 11 aa, Artificial Sequence
  Non-cyclic GFR-binding peptide
TELSPISMLFI

SEQ ID NO: 2090 - protein, 20 aa, Artificial Sequence
  Non-cyclic GFR-binding peptide
  MOD_RES (6)..(7): Xaa is C or S
STPPTXXVPTRLEPLTILYY

SEQ ID NO: 2091 - protein, 12 aa, Artificial Sequence
  Non-cyclic GFR-binding peptide
PTQLEPLPVVYY

SEQ ID NO: 2092 - protein, 18 aa, Artificial Sequence
  Non-cyclic GFR-binding peptide
  MOD_RES (4)..(5): Xaa is C or S
PKPXXAPTKLEPLTVLYY

SEQ ID NO: 2093 - protein, 18 aa, Artificial Sequence
  Non-cyclic GFR-binding peptide
  MOD_RES (4)..(5): Xaa is C or S
PKAXXVPTELEPLPMVYY

SEQ ID NO: 2094 - protein, 18 aa, Artificial Sequence
  Non-cyclic GFR-binding peptide
  MOD_RES (4)..(5): Xaa is C or S
ASPXXVSQDLEPLPIVYY

SEQ ID NO: 2095 - protein, 10 aa, Artificial Sequence
  Non-cyclic GFR-binding peptide
KLSPISVLFI

SEQ ID NO: 2096 - protein, 10 aa, Artificial Sequence
  Non-cyclic GFR-binding peptide
RLSAISILYL

SEQ ID NO: 2097 - protein, 20 aa, Artificial Sequence
  Non-cyclic GFR-binding peptide
  MOD_RES (6)..(7): Xaa is C or S
ASAAPXXVPQALSPISILFI

SEQ ID NO: 2098 - protein, 10 aa, Artificial Sequence
  Non-cyclic GFR-binding peptide
ELSPISMLFI

SEQ ID NO: 2099 - protein, 13 aa, Artificial Sequence
  Non-cyclic GFR-binding peptide
VPQALEPLTILYY

SEQ ID NO: 2100 - protein, 17 aa, Artificial Sequence
  Non-cyclic GFR-binding peptide
  MOD_RES (3)..(4): Xaa is C or S
PTXXVPTRLEPLPIVYY

SEQ ID NO: 2101 - protein, 13 aa, Artificial Sequence
  Non-cyclic GFR-binding peptide
APTQLEPLTVLYY

SEQ ID NO: 2102 - protein, 18 aa, Artificial Sequence
  Non-cyclic GFR-binding peptide
  MOD_RES (4)..(5): Xaa is C or S
PPTXXVPTRLEPLTILYY

SEQ ID NO: 2103 - protein, 12 aa, Artificial Sequence
  Non-cyclic GFR-binding peptide
PTQLEPLTVLYY

SEQ ID NO: 2104 - protein, 18 aa, Artificial Sequence
  Non-cyclic GFR-binding peptide
  MOD_RES (4)..(5): Xaa is C or S
PKPXXAPTKLEPLPVVYY

SEQ ID NO: 2105 - protein, 11 aa, Artificial Sequence
  Non-cyclic GFR-binding peptide
TRLSAISILYL

SEQ ID NO: 2106 - protein, 11 aa, Artificial Sequence
  Non-cyclic GFR-binding peptide
TKLSPISVLFI

SEQ ID NO: 2107 - protein, 13 aa, Artificial Sequence
  Non-cyclic GFR-binding peptide
VPTRLEPLTILYY

SEQ ID NO: 2108 - protein, 11 aa, Artificial Sequence
  Non-cyclic GFR-binding peptide
TELEPLPMVYY

SEQ ID NO: 2109 - protein, 20 aa, Artificial Sequence
  Non-cyclic GFR-binding peptide
  MOD_RES (6)..(7): Xaa is C or S
ASASPXXVPQDLSPISILFI

SEQ ID NO: 2110 - protein, 17 aa, Artificial Sequence
  Non-cyclic GFR-binding peptide
  MOD_RES (3)..(4): Xaa is C or S
KPXXAPTKLSPISVLFI

SEQ ID NO: 2111 - protein, 12 aa, Artificial Sequence
  Non-cyclic GFR-binding peptide
PTRLEPLPIVYY

SEQ ID NO: 2112 - protein, 16 aa, Artificial Sequence
  Non-cyclic GFR-binding peptide
  MOD_RES (2)..(3): Xaa is C or S
PXXVPQALEPLTILYY

SEQ ID NO: 2113 - protein, 11 aa, Artificial Sequence
  Non-cyclic GFR-binding peptide
QDLEPLPIVYY

SEQ ID NO: 2114 - protein, 18 aa, Artificial Sequence
  Non-cyclic GFR-binding peptide
  MOD_RES (4)..(5): Xaa is C or S
PKAXXVPTELEPLTMLYY

SEQ ID NO: 2115 - protein, 17 aa, Artificial Sequence
  Non-cyclic GFR-binding peptide
  MOD_RES (3)..(4): Xaa is C or S
KAXXVPTELSPISMLFI

SEQ ID NO: 2116 - protein, 10 aa, Artificial Sequence
  Non-cyclic GFR-binding peptide
ELEPLTMLYY

SEQ ID NO: 2117 - protein, 17 aa, Artificial Sequence
  Non-cyclic GFR-binding peptide
  MOD_RES (3)..(4): Xaa is C or S
APXXVPQALSPISILFI

SEQ ID NO: 2118 - protein, 20 aa, Artificial Sequence
  Non-cyclic GFR-binding peptide
  MOD_RES (6)..(7): Xaa is C or S
ASASPXXVPQDLEPLPIVYY

SEQ ID NO: 2119 - protein, 17 aa, Artificial Sequence
  Non-cyclic GFR-binding peptide
  MOD_RES (3)..(4): Xaa is C or S
KPXXAPTKLEPLPVVYY

SEQ ID NO: 2120 - protein, 12 aa, Artificial Sequence
  Non-cyclic GFR-binding peptide
SQDLEPLPIVYY

SEQ ID NO: 2121 - protein, 14 aa, Artificial Sequence
  Non-cyclic GFR-binding peptide
  MOD_RES (1)..(1): Xaa is C or S
XVPTRLNAISILYF

SEQ ID NO: 2122 - protein, 12 aa, Artificial Sequence
  Non-cyclic GFR-binding peptide
PTRLEPLTILYY

SEQ ID NO: 2123 - protein, 14 aa, Artificial Sequence
  Non-cyclic GFR-binding peptide
  MOD_RES (1)..(1): Xaa is C or S
XVPTRLSAISILYL

SEQ ID NO: 2124 - protein, 11 aa, Artificial Sequence
  Non-cyclic GFR-binding peptide
TELEPLTMLYY

SEQ ID NO: 2125 - protein, 19 aa, Artificial Sequence
  Non-cyclic GFR-binding peptide
  MOD_RES (5)..(6): Xaa is C or S
TPPTXXVPTRLEPLTILYY

SEQ ID NO: 2126 - protein, 20 aa, Artificial Sequence
  Non-cyclic GFR-binding peptide
  MOD_RES (6)..(7): Xaa is C or S
STPPTXXVPTRLEPLPIVYY

SEQ ID NO: 2127 - protein, 11 aa, Artificial Sequence
  Non-cyclic GFR-binding peptide
QDLSPISILFI

SEQ ID NO: 2128 - protein, 18 aa, Artificial Sequence
  Non-cyclic GFR-binding peptide
  MOD_RES (4)..(5): Xaa is C or S
PKAXXVPTELSPISMLFI

SEQ ID NO: 2129 - protein, 17 aa, Artificial Sequence
  Non-cyclic GFR-binding peptide
  MOD_RES (3)..(4): Xaa is C or S
KAXXVPTELEPLPMVYY

SEQ ID NO: 2130 - protein, 18 aa, Artificial Sequence
  Non-cyclic GFR-binding peptide
  MOD_RES (4)..(5): Xaa is C or S
PPTXXVPTRLNAISILYF

SEQ ID NO: 2131 - protein, 11 aa, Artificial Sequence
  Non-cyclic GFR-binding peptide
TKLEPLTVLYY

SEQ ID NO: 2132 - protein, 15 aa, Artificial Sequence
  Non-cyclic GFR-binding peptide
  MOD_RES (1)..(2): Xaa is C or S
XXAPTQLEPLPVVYY

SEQ ID NO: 2133 - protein, 17 aa, Artificial Sequence
  Non-cyclic GFR-binding peptide
  MOD_RES (3)..(4): Xaa is C or S
KPXXAPTKLEPLTVLYY

SEQ ID NO: 2134 - protein, 19 aa, Artificial Sequence
  Non-cyclic GFR-binding peptide
  MOD_RES (5)..(6): Xaa is C or S
SASPXXVSQDLSPISILFI

SEQ ID NO: 2135 - protein, 20 aa, Artificial Sequence
  Non-cyclic GFR-binding peptide
  MOD_RES (6)..(7): Xaa is C or S
ASAAPXXVPQALEPLTILYY

SEQ ID NO: 2136 - protein, 10 aa, Artificial Sequence
  Non-cyclic GFR-binding peptide
QLSPISVLFI

SEQ ID NO: 2137 - protein, 14 aa, Artificial Sequence
  Non-cyclic GFR-binding peptide
  MOD_RES (1)..(1): Xaa is C or S
XVPQDLEPLPIVYY

SEQ ID NO: 2138 - protein, 15 aa, Artificial Sequence
  Non-cyclic GFR-binding peptide
  MOD_RES (1)..(2): Xaa is C or S
XXVPTELSPISMLFI

SEQ ID NO: 2139 - protein, 18 aa, Artificial Sequence
  Non-cyclic GFR-binding peptide
  MOD_RES (4)..(5): Xaa is C or S
PKPXXAPTQLEPLTVLYY

SEQ ID NO: 2140 - protein, 20 aa, Artificial Sequence
  Non-cyclic GFR-binding peptide
  MOD_RES (6)..(7): Xaa is C or S
TVPKPXXAPTQLEPLPVVYY

SEQ ID NO: 2141 - protein, 16 aa, Artificial Sequence
  Non-cyclic GFR-binding peptide
  MOD_RES (2)..(3): Xaa is C or S
PXXAPTQLEPLPVVYY

SEQ ID NO: 2142 - protein, 17 aa, Artificial Sequence
  Non-cyclic GFR-binding peptide
  MOD_RES (3)..(4): Xaa is C or S
PTXXVPTRLSAISILYL

SEQ ID NO: 2143 - protein, 19 aa, Artificial Sequence
  Non-cyclic GFR-binding peptide
  MOD_RES (5)..(6): Xaa is C or S
TPPTXXVPTRLNAISILYF

SEQ ID NO: 2144 - protein, 18 aa, Artificial Sequence
  Non-cyclic GFR-binding peptide
  MOD_RES (4)..(5): Xaa is C or S
AAPXXVPQALEPLTILYY

SEQ ID NO: 2145 - protein, 11 aa, Artificial Sequence
  Non-cyclic GFR-binding peptide
TKLEPLPVVYY

SEQ ID NO: 2146 - protein, 19 aa, Artificial Sequence
  Non-cyclic GFR-binding peptide
  MOD_RES (5)..(6): Xaa is C or S
VPKPXXAPTQLEPLPVVYY

SEQ ID NO: 2147 - protein, 20 aa, Artificial Sequence
  Non-cyclic GFR-binding peptide
  MOD_RES (6)..(7): Xaa is C or S
STPPTXXVPTRLNAISILYF

SEQ ID NO: 2148 - protein, 15 aa, Artificial Sequence
  Non-cyclic GFR-binding peptide
  MOD_RES (1)..(2): Xaa is C or S
XXAPTQLEPLTVLYY

SEQ ID NO: 2149 - protein, 13 aa, Artificial Sequence
  Non-cyclic GFR-binding peptide
VPTRLNAISILYF

SEQ ID NO: 2150 - protein, 17 aa, Artificial Sequence
  Non-cyclic GFR-binding peptide
  MOD_RES (3)..(4): Xaa is C or S
SPXXVPQDLSPISILFI

SEQ ID NO: 2151 - protein, 16 aa, Artificial Sequence
  Non-cyclic GFR-binding peptide
  MOD_RES (2)..(3): Xaa is C or S
PXXVPQALSPISILFI

SEQ ID NO: 2152 - protein, 18 aa, Artificial Sequence
  Non-cyclic GFR-binding peptide
  MOD_RES (4)..(5): Xaa is C or S
ASPXXVPQDLEPLPIVYY

SEQ ID NO: 2153 - protein, 12 aa, Artificial Sequence
  Non-cyclic GFR-binding peptide
PTQLSPISVLFI

SEQ ID NO: 2154 - protein, 15 aa, Artificial Sequence
  Non-cyclic GFR-binding peptide
  MOD_RES (1)..(2): Xaa is C or S
XXVPTRLSAISILYL

SEQ ID NO: 2155 - protein, 12 aa, Artificial Sequence
  Non-cyclic GFR-binding peptide
PTKLSPISVLFI

SEQ ID NO: 2156 - protein, 12 aa, Artificial Sequence
  Non-cyclic GFR-binding peptide
PQALEPLTILYY

SEQ ID NO: 2157 - protein, 15 aa, Artificial Sequence
  Non-cyclic GFR-binding peptide
  MOD_RES (1)..(2): Xaa is C or S
XXVPTRLNAISILYF

SEQ ID NO: 2158 - protein, 18 aa, Artificial Sequence
  Non-cyclic GFR-binding peptide
  MOD_RES (5)..(5): Xaa is C or S
TKPTXAPTKLEPLPVVYY

SEQ ID NO: 2159 - protein, 11 aa, Artificial Sequence
  Non-cyclic GFR-binding peptide
TRLNAISILYF

SEQ ID NO: 2160 - protein, 15 aa, Artificial Sequence
  Non-cyclic GFR-binding peptide
  MOD_RES (1)..(2): Xaa is C or S
XXVPQALEPLTILYY

SEQ ID NO: 2161 - protein, 13 aa, Artificial Sequence
  Non-cyclic GFR-binding peptide
APTKLEPLTVLYY

SEQ ID NO: 2162 - protein, 20 aa, Artificial Sequence
  Non-cyclic GFR-binding peptide
  MOD_RES (6)..(7): Xaa is C or S
KIPKAXXVPTELEPLPMVYY

SEQ ID NO: 2163 - protein, 10 aa, Artificial Sequence
  Non-cyclic GFR-binding peptide
ALEPLTILYY

SEQ ID NO: 2164 - protein, 14 aa, Artificial Sequence
  Non-cyclic GFR-binding peptide
  MOD_RES (1)..(1): Xaa is C or S
XVPQALEPLTILYY

SEQ ID NO: 2165 - protein, 17 aa, Artificial Sequence
  Non-cyclic GFR-binding peptide
  MOD_RES (3)..(4): Xaa is C or S
SPXXVSQDLSPISILFI

SEQ ID NO: 2166 - protein, 15 aa, Artificial Sequence
  Non-cyclic GFR-binding peptide
  MOD_RES (1)..(2): Xaa is C or S
XXAPTKLEPLTVLYY

SEQ ID NO: 2167 - protein, 20 aa, Artificial Sequence
  Non-cyclic GFR-binding peptide
  MOD_RES (7)..(7): Xaa is C or S
HVTKPTXAPTKLEPLTVLYY

SEQ ID NO: 2168 - protein, 12 aa, Artificial Sequence
  Non-cyclic GFR-binding peptide
PQDLEPLPIVYY

SEQ ID NO: 2169 - protein, 14 aa, Artificial Sequence
  Non-cyclic GFR-binding peptide
  MOD_RES (1)..(1): Xaa is C or S
XAPTKLEPLPVVYY

SEQ ID NO: 2170 - protein, 16 aa, Artificial Sequence
  Non-cyclic GFR-binding peptide
  MOD_RES (2)..(3): Xaa is C or S
TXXVPTRLEPLPIVYY

SEQ ID NO: 2171 - protein, 18 aa, Artificial Sequence
  Non-cyclic GFR-binding peptide
  MOD_RES (4)..(5): Xaa is C or S
PKPXXAPTQLEPLPVVYY

SEQ ID NO: 2172 - protein, 16 aa, Artificial Sequence
  Non-cyclic GFR-binding peptide
  MOD_RES (2)..(3): Xaa is C or S
PXXAPTQLEPLTVLYY

SEQ ID NO: 2173 - protein, 17 aa, Artificial Sequence
  Non-cyclic GFR-binding peptide
  MOD_RES (3)..(4): Xaa is C or S
PTXXVPTRLNAISILYF

SEQ ID NO: 2174 - protein, 19 aa, Artificial Sequence
  Non-cyclic GFR-binding peptide
  MOD_RES (6)..(6): Xaa is C or S
VTKPTXAPTKLEPLPVVYY

SEQ ID NO: 2175 - protein, 16 aa, Artificial Sequence
  Non-cyclic GFR-binding peptide
  MOD_RES (2)..(3): Xaa is C or S
PXXVSQDLSPISILFI

SEQ ID NO: 2176 - protein, 13 aa, Artificial Sequence
  Non-cyclic GFR-binding peptide
APTQLEPLPVVYY

SEQ ID NO: 2177 - protein, 16 aa, Artificial Sequence
  Non-cyclic GFR-binding peptide
  MOD_RES (2)..(3): Xaa is C or S
AXXVPTELEPLPMVYY

SEQ ID NO: 2178 - protein, 12 aa, Artificial Sequence
  Non-cyclic GFR-binding peptide
PTELSPISMLFI

SEQ ID NO: 2179 - protein, 18 aa, Artificial Sequence
  Non-cyclic GFR-binding peptide
  MOD_RES (4)..(5): Xaa is C or S
PPTXXVPTRLSAISILYL

SEQ ID NO: 2180 - protein, 14 aa, Artificial Sequence
  Non-cyclic GFR-binding peptide
  MOD_RES (1)..(1): Xaa is C or S
XVPTELSPISMLFI

SEQ ID NO: 2181 - protein, 13 aa, Artificial Sequence
  Non-cyclic GFR-binding peptide
VKAVKVSRLQVQT

SEQ ID NO: 2182 - protein, 18 aa, Artificial Sequence
  Non-cyclic GFR-binding peptide
  MOD_RES (16)..(16): Xaa is C or S
MIQVTINSLQVQTPRXQV

SEQ ID NO: 2183 - protein, 13 aa, Artificial Sequence
  Non-cyclic GFR-binding peptide
IKRMQVPRQGTPV

SEQ ID NO: 2184 - protein, 11 aa, Artificial Sequence
  Non-cyclic GFR-binding peptide
IKRMQVPREET

SEQ ID NO: 2185 - protein, 14 aa, Artificial Sequence
  Non-cyclic GFR-binding peptide
IKRVQVPRHHVRSP

SEQ ID NO: 2186 - protein, 12 aa, Artificial Sequence
  Non-cyclic GFR-binding peptide
MIQVTINSHHVR

SEQ ID NO: 2187 - protein, 19 aa, Artificial Sequence
  Non-cyclic GFR-binding peptide
  MOD_RES (14)..(14): Xaa is C or S
IKRMQVPRQGTPVXELGED

SEQ ID NO: 2188 - protein, 14 aa, Artificial Sequence
  Non-cyclic GFR-binding peptide
  MOD_RES (14)..(14): Xaa is C or S
VKAMKVSREETPVX

SEQ ID NO: 2189 - protein, 10 aa, Artificial Sequence
  Non-cyclic GFR-binding peptide
MIQVTINSLQ

SEQ ID NO: 2190 - protein, 15 aa, Artificial Sequence
  Non-cyclic GFR-binding peptide
MIQVTINSLQVQTPR

SEQ ID NO: 2191 - protein, 15 aa, Artificial Sequence
  Non-cyclic GFR-binding peptide
VKAVKVSRLQVQTPR

SEQ ID NO: 2192 - protein, 9 aa, Artificial Sequence
  Non-cyclic GFR-binding peptide
IKRMQVPRQ

SEQ ID NO: 2193 - protein, 20 aa, Artificial Sequence
  Non-cyclic GFR-binding peptide
  MOD_RES (16)..(16): Xaa is C or S
MIQVTINSLQVQTPRXQVNR

SEQ ID NO: 2194 - protein, 15 aa, Artificial Sequence
  Non-cyclic GFR-binding peptide
IKRVQVPRHHVRSPQ

SEQ ID NO: 2195 - protein, 14 aa, Artificial Sequence
  Non-cyclic GFR-binding peptide
  MOD_RES (14)..(14): Xaa is C or S
IKRMQVPRQGTPVX

SEQ ID NO: 2196 - protein, 16 aa, Artificial Sequence
  Non-cyclic GFR-binding peptide
  MOD_RES (14)..(14): Xaa is C or S
VKAMKVSRQGTPVXEL

SEQ ID NO: 2197 - protein, 19 aa, Artificial Sequence
  Non-cyclic GFR-binding peptide
  MOD_RES (16)..(16): Xaa is C or S
IKRVQVPRHHVRSPQXKVS

SEQ ID NO: 2198 - protein, 11 aa, Artificial Sequence
  Non-cyclic GFR-binding peptide
VKAMKVSRQGT

SEQ ID NO: 2199 - protein, 17 aa, Artificial Sequence
  Non-cyclic GFR-binding peptide
  MOD_RES (14)..(14): Xaa is C or S
IKRMQVPREETPVXELG

SEQ ID NO: 2200 - protein, 20 aa, Artificial Sequence
  Non-cyclic GFR-binding peptide
  MOD_RES (16)..(16): Xaa is C or S
VKAVKVSRLQVQTPRXQVNR

SEQ ID NO: 2201 - protein, 19 aa, Artificial Sequence
  Non-cyclic GFR-binding peptide
  MOD_RES (14)..(14): Xaa is C or S
VKAMKVSREETPVXELGED

SEQ ID NO: 2202 - protein, 13 aa, Artificial Sequence
  Non-cyclic GFR-binding peptide
MIQVTINSLQVQT

SEQ ID NO: 2203 - protein, 13 aa, Artificial Sequence
  Non-cyclic GFR-binding peptide
VKAMKVSREETPV

SEQ ID NO: 2204 - protein, 11 aa, Artificial Sequence
  Non-cyclic GFR-binding peptide
MIQVTINSLQV

SEQ ID NO: 2205 - protein, 20 aa, Artificial Sequence
  Non-cyclic GFR-binding peptide
  MOD_RES (14)..(14): Xaa is C or S
VKAMKVSREETPVXELGEDN

SEQ ID NO: 2206 - protein, 16 aa, Artificial Sequence
  Non-cyclic GFR-binding peptide
  MOD_RES (14)..(14): Xaa is C or S
IKRMQVPREETPVXEL

SEQ ID NO: 2207 - protein, 17 aa, Artificial Sequence
  Non-cyclic GFR-binding peptide
  MOD_RES (16)..(16): Xaa is C or S
MIQVTINSHHVRSPQXK

SEQ ID NO: 2208 - protein, 18 aa, Artificial Sequence
  Non-cyclic GFR-binding peptide
  MOD_RES (16)..(16): Xaa is C or S
VKAVKVSRLQVQTPRXQV

SEQ ID NO: 2209 - protein, 16 aa, Artificial Sequence
  Non-cyclic GFR-binding peptide
  MOD_RES (16)..(16): Xaa is C or S
MIQVTINSLQVQTPRX

SEQ ID NO: 2210 - protein, 14 aa, Artificial Sequence
  Non-cyclic GFR-binding peptide
MIQVTINSHHVRSP

SEQ ID NO: 2211 - protein, 12 aa, Artificial Sequence
  Non-cyclic GFR-binding peptide
IKRVQVPRHHVR

SEQ ID NO: 2212 - protein, 10 aa, Artificial Sequence
  Non-cyclic GFR-binding peptide
IKRVQVPRHH

SEQ ID NO: 2213 - protein, 15 aa, Artificial Sequence
  Non-cyclic GFR-binding peptide
  MOD_RES (14)..(14): Xaa is C or S
VKAMKVSRQGTPVXE

SEQ ID NO: 2214 - protein, 10 aa, Artificial Sequence
  Non-cyclic GFR-binding peptide
VKAMKVSRQG

SEQ ID NO: 2215 - protein, 12 aa, Artificial Sequence
  Non-cyclic GFR-binding peptide
IKRMQVPREETP

SEQ ID NO: 2216 - protein, 20 aa, Artificial Sequence
  Non-cyclic GFR-binding peptide
  MOD_RES (16)..(16): Xaa is C or S
IKRVQVPRHHVRSPQXKVSS

SEQ ID NO: 2217 - protein, 15 aa, Artificial Sequence
  Non-cyclic GFR-binding peptide
  MOD_RES (14)..(14): Xaa is C or S
VKAMKVSREETPVXE

SEQ ID NO: 2218 - protein, 10 aa, Artificial Sequence
  Non-cyclic GFR-binding peptide
VKAMKVSREE

SEQ ID NO: 2219 - protein, 19 aa, Artificial Sequence
  Non-cyclic GFR-binding peptide
  MOD_RES (14)..(14): Xaa is C or S
VKAMKVSRQGTPVXELGED

SEQ ID NO: 2220 - protein, 14 aa, Artificial Sequence
  Non-cyclic GFR-binding peptide
  MOD_RES (14)..(14): Xaa is C or S
IKRMQVPREETPVX

SEQ ID NO: 2221 - protein, 13 aa, Artificial Sequence
  Non-cyclic GFR-binding peptide
MIQVTINSHHVRS

SEQ ID NO: 2222 - protein, 15 aa, Artificial Sequence
  Non-cyclic GFR-binding peptide
MIQVTINSHHVRSPQ

SEQ ID NO: 2223 - protein, 12 aa, Artificial Sequence
  Non-cyclic GFR-binding peptide
VKAVKVSRLQVQ

SEQ ID NO: 2224 - protein, 9 aa, Artificial Sequence
  Non-cyclic GFR-binding peptide
VKAMKVSRQ

SEQ ID NO: 2225 - protein, 9 aa, Artificial Sequence
  Non-cyclic GFR-binding peptide
VKAVKVSRL

SEQ ID NO: 2226 - protein, 10 aa, Artificial Sequence
  Non-cyclic GFR-binding peptide
VKAVKVSRLQ

SEQ ID NO: 2227 - protein, 20 aa, Artificial Sequence
  Non-cyclic GFR-binding peptide
  MOD_RES (16)..(16): Xaa is C or S
MIQVTINSHHVRSPQXKVSS

SEQ ID NO: 2228 - protein, 19 aa, Artificial Sequence
  Non-cyclic GFR-binding peptide
  MOD_RES (16)..(16): Xaa is C or S
VKAVKVSRLQVQTPRXQVN

SEQ ID NO: 2229 - protein, 14 aa, Artificial Sequence
  Non-cyclic GFR-binding peptide
  MOD_RES (14)..(14): Xaa is C or S
VKAMKVSRQGTPVX

SEQ ID NO: 2230 - protein, 19 aa, Artificial Sequence
  Non-cyclic GFR-binding peptide
  MOD_RES (14)..(14): Xaa is C or S
IKRMQVPREETPVXELGED

SEQ ID NO: 2231 - protein, 11 aa, Artificial Sequence
  Non-cyclic GFR-binding peptide
MIQVTINSHHV

SEQ ID NO: 2232 - protein, 11 aa, Artificial Sequence
  Non-cyclic GFR-binding peptide
IKRMQVPRQGT

SEQ ID NO: 2233 - protein, 16 aa, Artificial Sequence
  Non-cyclic GFR-binding peptide
  MOD_RES (14)..(14): Xaa is C or S
IKRMQVPRQGTPVXEL

SEQ ID NO: 2234 - protein, 18 aa, Artificial Sequence
  Non-cyclic GFR-binding peptide
  MOD_RES (16)..(16): Xaa is C or S
MIQVTINSHHVRSPQXKV

SEQ ID NO: 2235 - protein, 13 aa, Artificial Sequence
  Non-cyclic GFR-binding peptide
IKRMQVPREETPV

SEQ ID NO: 2236 - protein, 14 aa, Artificial Sequence
  Non-cyclic GFR-binding peptide
MIQVTINSLQVQTP

SEQ ID NO: 2237 - protein, 10 aa, Artificial Sequence
  Non-cyclic GFR-binding peptide
MIQVTINSHH

SEQ ID NO: 2238 - protein, 13 aa, Artificial Sequence
  Non-cyclic GFR-binding peptide
VKAMKVSRQGTPV

SEQ ID NO: 2239 - protein, 18 aa, Artificial Sequence
  Non-cyclic GFR-binding peptide
  MOD_RES (14)..(14): Xaa is C or S
VKAMKVSRQGTPVXELGE

SEQ ID NO: 2240 - protein, 16 aa, Artificial Sequence
  Non-cyclic GFR-binding peptide
  MOD_RES (16)..(16): Xaa is C or S
VKAVKVSRLQVQTPRX

SEQ ID NO: 2241 - protein, 14 aa, Artificial Sequence
  Non-cyclic GFR-binding peptide
VKAVKVSRLQVQTP

SEQ ID NO: 2242 - protein, 13 aa, Artificial Sequence
  Non-cyclic GFR-binding peptide
IKRVQVPRHHVRS

SEQ ID NO: 2243 - protein, 12 aa, Artificial Sequence
  Non-cyclic GFR-binding peptide
IKRMQVPRQGTP

SEQ ID NO: 2244 - protein, 20 aa, Artificial Sequence
  Non-cyclic GFR-binding peptide
  MOD_RES (14)..(14): Xaa is C or S
VKAMKVSRQGTPVXELGEDN

SEQ ID NO: 2245 - protein, 17 aa, Artificial Sequence
  Non-cyclic GFR-binding peptide
  MOD_RES (16)..(16): Xaa is C or S
MIQVTINSLQVQTPRXQ

SEQ ID NO: 2246 - protein, 17 aa, Artificial Sequence
  Non-cyclic GFR-binding peptide
  MOD_RES (14)..(14): Xaa is C or S
VKAMKVSRQGTPVXELG

SEQ ID NO: 2247 - protein, 11 aa, Artificial Sequence
  Non-cyclic GFR-binding peptide
VKAMKVSREET

SEQ ID NO: 2248 - protein, 18 aa, Artificial Sequence
  Non-cyclic GFR-binding peptide
  MOD_RES (14)..(14): Xaa is C or S
IKRMQVPREETPVXELGE

SEQ ID NO: 2249 - protein, 11 aa, Artificial Sequence
  Non-cyclic GFR-binding peptide
IKRVQVPRHHV

SEQ ID NO: 2250 - protein, 9 aa, Artificial Sequence
  Non-cyclic GFR-binding peptide
VKAMKVSRE

SEQ ID NO: 2251 - protein, 18 aa, Artificial Sequence
  Non-cyclic GFR-binding peptide
  MOD_RES (16)..(16): Xaa is C or S
IKRVQVPRHHVRSPQXKV

SEQ ID NO: 2252 - protein, 18 aa, Artificial Sequence
  Non-cyclic GFR-binding peptide
  MOD_RES (14)..(14): Xaa is C or S
IKRMQVPRQGTPVXELGE

SEQ ID NO: 2253 - protein, 17 aa, Artificial Sequence
  Non-cyclic GFR-binding peptide
  MOD_RES (16)..(16): Xaa is C or S
VKAVKVSRLQVQTPRXQ

SEQ ID NO: 2254 - protein, 20 aa, Artificial Sequence
  Non-cyclic GFR-binding peptide
  MOD_RES (14)..(14): Xaa is C or S
IKRMQVPRQGTPVXELGEDN

SEQ ID NO: 2255 - protein, 11 aa, Artificial Sequence
  Non-cyclic GFR-binding peptide
VKAVKVSRLQV

SEQ ID NO: 2256 - protein, 12 aa, Artificial Sequence
  Non-cyclic GFR-binding peptide
VKAMKVSREETP

SEQ ID NO: 2257 - protein, 17 aa, Artificial Sequence
  Non-cyclic GFR-binding peptide
  MOD_RES (16)..(16): Xaa is C or S
IKRVQVPRHHVRSPQXK

SEQ ID NO: 2258 - protein, 15 aa, Artificial Sequence
  Non-cyclic GFR-binding peptide
  MOD_RES (14)..(14): Xaa is C or S
IKRMQVPRQGTPVXE

SEQ ID NO: 2259 - protein, 10 aa, Artificial Sequence
  Non-cyclic GFR-binding peptide
IKRMQVPRQG

SEQ ID NO: 2260 - protein, 17 aa, Artificial Sequence
  Non-cyclic GFR-binding peptide
  MOD_RES (14)..(14): Xaa is C or S
VKAMKVSREETPVXELG

SEQ ID NO: 2261 - protein, 20 aa, Artificial Sequence
  Non-cyclic GFR-binding peptide
  MOD_RES (14)..(14): Xaa is C or S
IKRMQVPREETPVXELGEDN

SEQ ID NO: 2262 - protein, 17 aa, Artificial Sequence
  Non-cyclic GFR-binding peptide
  MOD_RES (14)..(14): Xaa is C or S
IKRMQVPRQGTPVXELG

SEQ ID NO: 2263 - protein, 9 aa, Artificial Sequence
  Non-cyclic GFR-binding peptide
IKRMQVPRE

SEQ ID NO: 2264 - protein, 19 aa, Artificial Sequence
  Non-cyclic GFR-binding peptide
  MOD_RES (16)..(16): Xaa is C or S
MIQVTINSHHVRSPQXKVS

SEQ ID NO: 2265 - protein, 9 aa, Artificial Sequence
  Non-cyclic GFR-binding peptide
MIQVTINSL

SEQ ID NO: 2266 - protein, 16 aa, Artificial Sequence
  Non-cyclic GFR-binding peptide
  MOD_RES (14)..(14): Xaa is C or S
VKAMKVSREETPVXEL

SEQ ID NO: 2267 - protein, 18 aa, Artificial Sequence
  Non-cyclic GFR-binding peptide
  MOD_RES (14)..(14): Xaa is C or S
VKAMKVSREETPVXELGE

SEQ ID NO: 2268 - protein, 16 aa, Artificial Sequence
  Non-cyclic GFR-binding peptide
  MOD_RES (16)..(16): Xaa is C or S
IKRVQVPRHHVRSPQX

SEQ ID NO: 2269 - protein, 19 aa, Artificial Sequence
  Non-cyclic GFR-binding peptide
  MOD_RES (16)..(16): Xaa is C or S
MIQVTINSLQVQTPRXQVN

SEQ ID NO: 2270 - protein, 9 aa, Artificial Sequence
  Non-cyclic GFR-binding peptide
IKRVQVPRH

SEQ ID NO: 2271 - protein, 16 aa, Artificial Sequence
  Non-cyclic GFR-binding peptide
  MOD_RES (16)..(16): Xaa is C or S
MIQVTINSHHVRSPQX

SEQ ID NO: 2272 - protein, 9 aa, Artificial Sequence
  Non-cyclic GFR-binding peptide
MIQVTINSH

SEQ ID NO: 2273 - protein, 15 aa, Artificial Sequence
  Non-cyclic GFR-binding peptide
  MOD_RES (14)..(14): Xaa is C or S
IKRMQVPREETPVXE

SEQ ID NO: 2274 - protein, 10 aa, Artificial Sequence
  Non-cyclic GFR-binding peptide
IKRMQVPREE

SEQ ID NO: 2275 - protein, 12 aa, Artificial Sequence
  Non-cyclic GFR-binding peptide
VKAMKVSRQGTP

SEQ ID NO: 2276 - protein, 12 aa, Artificial Sequence
  Non-cyclic GFR-binding peptide
MIQVTINSLQVQ

SEQ ID NO: 2277 - protein, 13 aa, Artificial Sequence
  Non-cyclic GFR-binding peptide
TQVQLRSVKVAKV

SEQ ID NO: 2278 - protein, 18 aa, Artificial Sequence
  Non-cyclic GFR-binding peptide
  MOD_RES (3)..(3): Xaa is C or S
VQXRPTQVQLSNITVQIM

SEQ ID NO: 2279 - protein, 13 aa, Artificial Sequence
  Non-cyclic GFR-binding peptide
VPTGQRPVQMRKI

SEQ ID NO: 2280 - protein, 11 aa, Artificial Sequence
  Non-cyclic GFR-binding peptide
TEERPVQMRKI

SEQ ID NO: 2281 - protein, 14 aa, Artificial Sequence
  Non-cyclic GFR-binding peptide
PSRVHHRPVQVRKI

SEQ ID NO: 2282 - protein, 12 aa, Artificial Sequence
  Non-cyclic GFR-binding peptide
RVHHSNITVQIM

SEQ ID NO: 2283 - protein, 19 aa, Artificial Sequence
  Non-cyclic GFR-binding peptide
  MOD_RES (6)..(6): Xaa is C or S
DEGLEXVPTGQRPVQMRKI

SEQ ID NO: 2284 - protein, 14 aa, Artificial Sequence
  Non-cyclic GFR-binding peptide
  MOD_RES (1)..(1): Xaa is C or S
XVPTEERSVKMAKV

SEQ ID NO: 2285 - protein, 10 aa, Artificial Sequence
  Non-cyclic GFR-binding peptide
QLSNITVQIM

SEQ ID NO: 2286 - protein, 15 aa, Artificial Sequence
  Non-cyclic GFR-binding peptide
RPTQVQLSNITVQIM

SEQ ID NO: 2287 - protein, 15 aa, Artificial Sequence
  Non-cyclic GFR-binding peptide
RPTQVQLRSVKVAKV

SEQ ID NO: 2288 - protein, 9 aa, Artificial Sequence
  Non-cyclic GFR-binding peptide
QRPVQMRKI

SEQ ID NO: 2289 - protein, 20 aa, Artificial Sequence
  Non-cyclic GFR-binding peptide
  MOD_RES (5)..(5): Xaa is C or S
RNVQXRPTQVQLSNITVQIM

SEQ ID NO: 2290 - protein, 15 aa, Artificial Sequence
  Non-cyclic GFR-binding peptide
QPSRVHHRPVQVRKI

SEQ ID NO: 2291 - protein, 14 aa, Artificial Sequence
  Non-cyclic GFR-binding peptide
  MOD_RES (1)..(1): Xaa is C or S
XVPTGQRPVQMRKI

SEQ ID NO: 2292 - protein, 16 aa, Artificial Sequence
  Non-cyclic GFR-binding peptide
  MOD_RES (3)..(3): Xaa is C or S
LEXVPTGQRSVKMAKV

SEQ ID NO: 2293 - protein, 19 aa, Artificial Sequence
  Non-cyclic GFR-binding peptide
  MOD_RES (4)..(4): Xaa is C or S
SVKXQPSRVHHRPVQVRKI

SEQ ID NO: 2294 - protein, 11 aa, Artificial Sequence
  Non-cyclic GFR-binding peptide
TGQRSVKMAKV

SEQ ID NO: 2295 - protein, 17 aa, Artificial Sequence
  Non-cyclic GFR-binding peptide
  MOD_RES (4)..(4): Xaa is C or S
GLEXVPTEERPVQMRKI

SEQ ID NO: 2296 - protein, 20 aa, Artificial Sequence
  Non-cyclic GFR-binding peptide
  MOD_RES (5)..(5): Xaa is C or S
RNVQXRPTQVQLRSVKVAKV

SEQ ID NO: 2297 - protein, 19 aa, Artificial Sequence
  Non-cyclic GFR-binding peptide
  MOD_RES (6)..(6): Xaa is C or S
DEGLEXVPTEERSVKMAKV

SEQ ID NO: 2298 - protein, 13 aa, Artificial Sequence
  Non-cyclic GFR-binding peptide
TQVQLSNITVQIM

SEQ ID NO: 2299 - protein, 13 aa, Artificial Sequence
  Non-cyclic GFR-binding peptide
VPTEERSVKMAKV

SEQ ID NO: 2300 - protein, 11 aa, Artificial Sequence
  Non-cyclic GFR-binding peptide
VQLSNITVQIM

SEQ ID NO: 2301 - protein, 20 aa, Artificial Sequence
  Non-cyclic GFR-binding peptide
  MOD_RES (7)..(7): Xaa is C or S
NDEGLEXVPTEERSVKMAKV

SEQ ID NO: 2302 - protein, 16 aa, Artificial Sequence
  Non-cyclic GFR-binding peptide
  MOD_RES (3)..(3): Xaa is C or S
LEXVPTEERPVQMRKI

SEQ ID NO: 2303 - protein, 17 aa, Artificial Sequence
  Non-cyclic GFR-binding peptide
  MOD_RES (2)..(2): Xaa is C or S
KXQPSRVHHSNITVQIM

SEQ ID NO: 2304 - protein, 18 aa, Artificial Sequence
  Non-cyclic GFR-binding peptide
  MOD_RES (3)..(3): Xaa is C or S
VQXRPTQVQLRSVKVAKV

SEQ ID NO: 2305 - protein, 16 aa, Artificial Sequence
  Non-cyclic GFR-binding peptide
  MOD_RES (1)..(1): Xaa is C or S
XRPTQVQLSNITVQIM

SEQ ID NO: 2306 - protein, 14 aa, Artificial Sequence
  Non-cyclic GFR-binding peptide
PSRVHHSNITVQIM

SEQ ID NO: 2307 - protein, 12 aa, Artificial Sequence
  Non-cyclic GFR-binding peptide
RVHHRPVQVRKI

SEQ ID NO: 2308 - protein, 10 aa, Artificial Sequence
  Non-cyclic GFR-binding peptide
HHRPVQVRKI

SEQ ID NO: 2309 - protein, 15 aa, Artificial Sequence
  Non-cyclic GFR-binding peptide
  MOD_RES (2)..(2): Xaa is C or S
EXVPTGQRSVKMAKV

SEQ ID NO: 2310 - protein, 10 aa, Artificial Sequence
  Non-cyclic GFR-binding peptide
GQRSVKMAKV

SEQ ID NO: 2311 - protein, 12 aa, Artificial Sequence
  Non-cyclic GFR-binding peptide
PTEERPVQMRKI

SEQ ID NO: 2312 - protein, 20 aa, Artificial Sequence
  Non-cyclic GFR-binding peptide
  MOD_RES (5)..(5): Xaa is C or S
SSVKXQPSRVHHRPVQVRKI

SEQ ID NO: 2313 - protein, 15 aa, Artificial Sequence
  Non-cyclic GFR-binding peptide
  MOD_RES (2)..(2): Xaa is C or S
EXVPTEERSVKMAKV

SEQ ID NO: 2314 - protein, 10 aa, Artificial Sequence
  Non-cyclic GFR-binding peptide
EERSVKMAKV

SEQ ID NO: 2315 - protein, 19 aa, Artificial Sequence
  Non-cyclic GFR-binding peptide
  MOD_RES (6)..(6): Xaa is C or S
DEGLEXVPTGQRSVKMAKV

SEQ ID NO: 2316 - protein, 14 aa, Artificial Sequence
  Non-cyclic GFR-binding peptide
  MOD_RES (1)..(1): Xaa is C or S
XVPTEERPVQMRKI

SEQ ID NO: 2317 - protein, 13 aa, Artificial Sequence
  Non-cyclic GFR-binding peptide
SRVHHSNITVQIM

SEQ ID NO: 2318 - protein, 15 aa, Artificial Sequence
  Non-cyclic GFR-binding peptide
QPSRVHHSNITVQIM

SEQ ID NO: 2319 - protein, 12 aa, Artificial Sequence
  Non-cyclic GFR-binding peptide
QVQLRSVKVAKV

SEQ ID NO: 2320 - protein, 9 aa, Artificial Sequence
  Non-cyclic GFR-binding peptide
QRSVKMAKV

SEQ ID NO: 2321 - protein, 9 aa, Artificial Sequence
  Non-cyclic GFR-binding peptide
LRSVKVAKV

SEQ ID NO: 2322 - protein, 10 aa, Artificial Sequence
  Non-cyclic GFR-binding peptide
QLRSVKVAKV

SEQ ID NO: 2323 - protein, 20 aa, Artificial Sequence
  Non-cyclic GFR-binding peptide
  MOD_RES (5)..(5): Xaa is C or S
SSVKXQPSRVHHSNITVQIM

SEQ ID NO: 2324 - protein, 19 aa, Artificial Sequence
  Non-cyclic GFR-binding peptide
  MOD_RES (4)..(4): Xaa is C or S
NVQXRPTQVQLRSVKVAKV

SEQ ID NO: 2325 - protein, 14 aa, Artificial Sequence
  Non-cyclic GFR-binding peptide
  MOD_RES (1)..(1): Xaa is C or S
XVPTGQRSVKMAKV

SEQ ID NO: 2326 - protein, 19 aa, Artificial Sequence
  Non-cyclic GFR-binding peptide
  MOD_RES (6)..(6): Xaa is C or S
DEGLEXVPTEERPVQMRKI

SEQ ID NO: 2327 - protein, 11 aa, Artificial Sequence
  Non-cyclic GFR-binding peptide
VHHSNITVQIM

SEQ ID NO: 2328 - protein, 11 aa, Artificial Sequence
  Non-cyclic GFR-binding peptide
TGQRPVQMRKI

SEQ ID NO: 2329 - protein, 16 aa, Artificial Sequence
  Non-cyclic GFR-binding peptide
  MOD_RES (3)..(3): Xaa is C or S
LEXVPTGQRPVQMRKI

SEQ ID NO: 2330 - protein, 18 aa, Artificial Sequence
  Non-cyclic GFR-binding peptide
  MOD_RES (3)..(3): Xaa is C or S
VKXQPSRVHHSNITVQIM

SEQ ID NO: 2331 - protein, 13 aa, Artificial Sequence
  Non-cyclic GFR-binding peptide
VPTEERPVQMRKI

SEQ ID NO: 2332 - protein, 14 aa, Artificial Sequence
  Non-cyclic GFR-binding peptide
PTQVQLSNITVQIM

SEQ ID NO: 2333 - protein, 10 aa, Artificial Sequence
  Non-cyclic GFR-binding peptide
HHSNITVQIM

SEQ ID NO: 2334 - protein, 13 aa, Artificial Sequence
  Non-cyclic GFR-binding peptide
VPTGQRSVKMAKV

SEQ ID NO: 2335 - protein, 18 aa, Artificial Sequence
  Non-cyclic GFR-binding peptide
  MOD_RES (5)..(5): Xaa is C or S
EGLEXVPTGQRSVKMAKV

SEQ ID NO: 2336 - protein, 16 aa, Artificial Sequence
  Non-cyclic GFR-binding peptide
  MOD_RES (1)..(1): Xaa is C or S
XRPTQVQLRSVKVAKV

SEQ ID NO: 2337 - protein, 14 aa, Artificial Sequence
  Non-cyclic GFR-binding peptide
PTQVQLRSVKVAKV

SEQ ID NO: 2338 - protein, 13 aa, Artificial Sequence
  Non-cyclic GFR-binding peptide
SRVHHRPVQVRKI

SEQ ID NO: 2339 - protein, 12 aa, Artificial Sequence
  Non-cyclic GFR-binding peptide
PTGQRPVQMRKI

SEQ ID NO: 2340 - protein, 20 aa, Artificial Sequence
  Non-cyclic GFR-binding peptide
  MOD_RES (7)..(7): Xaa is C or S
NDEGLEXVPTGQRSVKMAKV

SEQ ID NO: 2341 - protein, 17 aa, Artificial Sequence
  Non-cyclic GFR-binding peptide
  MOD_RES (2)..(2): Xaa is C or S
QXRPTQVQLSNITVQIM

SEQ ID NO: 2342 - protein, 17 aa, Artificial Sequence
  Non-cyclic GFR-binding peptide
  MOD_RES (4)..(4): Xaa is C or S
GLEXVPTGQRSVKMAKV

SEQ ID NO: 2343 - protein, 11 aa, Artificial Sequence
  Non-cyclic GFR-binding peptide
TEERSVKMAKV

SEQ ID NO: 2344 - protein, 18 aa, Artificial Sequence
  Non-cyclic GFR-binding peptide
  MOD_RES (5)..(5): Xaa is C or S
EGLEXVPTEERPVQMRKI

SEQ ID NO: 2345 - protein, 11 aa, Artificial Sequence
  Non-cyclic GFR-binding peptide
VHHRPVQVRKI

SEQ ID NO: 2346 - protein, 9 aa, Artificial Sequence
  Non-cyclic GFR-binding peptide
ERSVKMAKV

SEQ ID NO: 2347 - protein, 18 aa, Artificial Sequence
  Non-cyclic GFR-binding peptide
  MOD_RES (3)..(3): Xaa is C or S
VKXQPSRVHHRPVQVRKI

SEQ ID NO: 2348 - protein, 18 aa, Artificial Sequence
  Non-cyclic GFR-binding peptide
  MOD_RES (5)..(5): Xaa is C or S
EGLEXVPTGQRPVQMRKI

SEQ ID NO: 2349 - protein, 17 aa, Artificial Sequence
  Non-cyclic GFR-binding peptide
  MOD_RES (2)..(2): Xaa is C or S
QXRPTQVQLRSVKVAKV

SEQ ID NO: 2350 - protein, 20 aa, Artificial Sequence
  Non-cyclic GFR-binding peptide
  MOD_RES (7)..(7): Xaa is C or S
NDEGLEXVPTGQRPVQMRKI

SEQ ID NO: 2351 - protein, 11 aa, Artificial Sequence
  Non-cyclic GFR-binding peptide
VQLRSVKVAKV

SEQ ID NO: 2352 - protein, 12 aa, Artificial Sequence
  Non-cyclic GFR-binding peptide
PTEERSVKMAKV

SEQ ID NO: 2353 - protein, 17 aa, Artificial Sequence
  Non-cyclic GFR-binding peptide
  MOD_RES (2)..(2): Xaa is C or S
KXQPSRVHHRPVQVRKI

SEQ ID NO: 2354 - protein, 15 aa, Artificial Sequence
  Non-cyclic GFR-binding peptide
  MOD_RES (2)..(2): Xaa is C or S
EXVPTGQRPVQMRKI

SEQ ID NO: 2355 - protein, 10 aa, Artificial Sequence
  Non-cyclic GFR-binding peptide
GQRPVQMRKI

SEQ ID NO: 2356 - protein, 17 aa, Artificial Sequence
  Non-cyclic GFR-binding peptide
  MOD_RES (4)..(4): Xaa is C or S
GLEXVPTEERSVKMAKV

SEQ ID NO: 2357 - protein, 20 aa, Artificial Sequence
  Non-cyclic GFR-binding peptide
  MOD_RES (7)..(7): Xaa is C or S
NDEGLEXVPTEERPVQMRKI

SEQ ID NO: 2358 - protein, 17 aa, Artificial Sequence
  Non-cyclic GFR-binding peptide
  MOD_RES (4)..(4): Xaa is C or S
GLEXVPTGQRPVQMRKI

SEQ ID NO: 2359 - protein, 9 aa, Artificial Sequence
  Non-cyclic GFR-binding peptide
ERPVQMRKI

SEQ ID NO: 2360 - protein, 19 aa, Artificial Sequence
  Non-cyclic GFR-binding peptide
  MOD_RES (4)..(4): Xaa is C or S
SVKXQPSRVHHSNITVQIM

SEQ ID NO: 2361 - protein, 9 aa, Artificial Sequence
  Non-cyclic GFR-binding peptide
LSNITVQIM

SEQ ID NO: 2362 - protein, 16 aa, Artificial Sequence
  Non-cyclic GFR-binding peptide
  MOD_RES (3)..(3): Xaa is C or S
LEXVPTEERSVKMAKV

SEQ ID NO: 2363 - protein, 18 aa, Artificial Sequence
  Non-cyclic GFR-binding peptide
  MOD_RES (5)..(5): Xaa is C or S
EGLEXVPTEERSVKMAKV

SEQ ID NO: 2364 - protein, 16 aa, Artificial Sequence
  Non-cyclic GFR-binding peptide
  MOD_RES (1)..(1): Xaa is C or S
XQPSRVHHRPVQVRKI

SEQ ID NO: 2365 - protein, 19 aa, Artificial Sequence
  Non-cyclic GFR-binding peptide
  MOD_RES (4)..(4): Xaa is C or S
NVQXRPTQVQLSNITVQIM

SEQ ID NO: 2366 - protein, 9 aa, Artificial Sequence
  Non-cyclic GFR-binding peptide
HRPVQVRKI

SEQ ID NO: 2367 - protein, 16 aa, Artificial Sequence
  Non-cyclic GFR-binding peptide
  MOD_RES (1)..(1): Xaa is C or S
XQPSRVHHSNITVQIM

SEQ ID NO: 2368 - protein, 9 aa, Artificial Sequence
  Non-cyclic GFR-binding peptide
HSNITVQIM

SEQ ID NO: 2369 - protein, 15 aa, Artificial Sequence
  Non-cyclic GFR-binding peptide
  MOD_RES (2)..(2): Xaa is C or S
EXVPTEERPVQMRKI

SEQ ID NO: 2370 - protein, 10 aa, Artificial Sequence
  Non-cyclic GFR-binding peptide
EERPVQMRKI

SEQ ID NO: 2371 - protein, 12 aa, Artificial Sequence
  Non-cyclic GFR-binding peptide
PTGQRSVKMAKV

SEQ ID NO: 2372 - protein, 12 aa, Artificial Sequence
  Non-cyclic GFR-binding peptide
QVQLSNITVQIM

SEQ ID NO: 2373 - protein, 10 aa, Artificial Sequence
  Non-cyclic GFR-binding peptide
IYLMSIPSLE

SEQ ID NO: 2374 - protein, 18 aa, Artificial Sequence
  Non-cyclic GFR-binding peptide
  MOD_RES (14)..(15): Xaa is C or S
IYLISIPSLDQSVXXPSA

SEQ ID NO: 2375 - protein, 13 aa, Artificial Sequence
  Non-cyclic GFR-binding peptide
LYLISIPELDQPV

SEQ ID NO: 2376 - protein, 14 aa, Artificial Sequence
  Non-cyclic GFR-binding peptide
  MOD_RES (14)..(14): Xaa is C or S
FYLISIANLKTPVX

SEQ ID NO: 2377 - protein, 13 aa, Artificial Sequence
  Non-cyclic GFR-binding peptide
LYLMSIPELETPV

SEQ ID NO: 2378 - protein, 15 aa, Artificial Sequence
  Non-cyclic GFR-binding peptide
  MOD_RES (14)..(15): Xaa is C or S
LYLVSIPELKTPAXX

SEQ ID NO: 2379 - protein, 19 aa, Artificial Sequence
  Non-cyclic GFR-binding peptide
  MOD_RES (14)..(15): Xaa is C or S
KYLISIPSLRAPVXXSAPA

SEQ ID NO: 2380 - protein, 14 aa, Artificial Sequence
  Non-cyclic GFR-binding peptide
  MOD_RES (14)..(14): Xaa is C or S
LYLISIPELDQSVX

SEQ ID NO: 2381 - protein, 16 aa, Artificial Sequence
  Non-cyclic GFR-binding peptide
  MOD_RES (14)..(14): Xaa is C or S
LYLVSIPELKTPAXTP

SEQ ID NO: 2382 - protein, 19 aa, Artificial Sequence
  Non-cyclic GFR-binding peptide
  MOD_RES (14)..(15): Xaa is C or S
LYLVSIPELKTPAXXPKPV

SEQ ID NO: 2383 - protein, 10 aa, Artificial Sequence
  Non-cyclic GFR-binding peptide
LYLISIPELD

SEQ ID NO: 2384 - protein, 17 aa, Artificial Sequence
  Non-cyclic GFR-binding peptide
  MOD_RES (14)..(15): Xaa is C or S
LYLISIPELRAPVXXSA

SEQ ID NO: 2385 - protein, 12 aa, Artificial Sequence
  Non-cyclic GFR-binding peptide
IYLISIPSLAQP

SEQ ID NO: 2386 - protein, 12 aa, Artificial Sequence
  Non-cyclic GFR-binding peptide
FYLISIANLRAP

SEQ ID NO: 2387 - protein, 18 aa, Artificial Sequence
  Non-cyclic GFR-binding peptide
  MOD_RES (14)..(15): Xaa is C or S
IYLMSIPSLETPVXXAKP

SEQ ID NO: 2388 - protein, 14 aa, Artificial Sequence
  Non-cyclic GFR-binding peptide
  MOD_RES (14)..(14): Xaa is C or S
IYLISIPSLKTPVX

SEQ ID NO: 2389 - protein, 14 aa, Artificial Sequence
  Non-cyclic GFR-binding peptide
  MOD_RES (14)..(14): Xaa is C or S
KYLISIPSLKTPVX

SEQ ID NO: 2390 - protein, 19 aa, Artificial Sequence
  Non-cyclic GFR-binding peptide
  MOD_RES (14)..(15): Xaa is C or S
LYLVSIPELKTPVXXAKGV

SEQ ID NO: 2391 - protein, 16 aa, Artificial Sequence
  Non-cyclic GFR-binding peptide
  MOD_RES (14)..(15): Xaa is C or S
LYLISIPELDQPVXXP

SEQ ID NO: 2392 - protein, 17 aa, Artificial Sequence
  Non-cyclic GFR-binding peptide
  MOD_RES (14)..(15): Xaa is C or S
LYLISIPELDQSVXXPS

SEQ ID NO: 2393 - protein, 16 aa, Artificial Sequence
  Non-cyclic GFR-binding peptide
  MOD_RES (14)..(15): Xaa is C or S
FYLISIANLRAPVXXS

SEQ ID NO: 2394 - protein, 9 aa, Artificial Sequence
  Non-cyclic GFR-binding peptide
LYLVSIPEL

SEQ ID NO: 2395 - protein, 19 aa, Artificial Sequence
  Non-cyclic GFR-binding peptide
  MOD_RES (14)..(15): Xaa is C or S
FYLISIANLRAPVXXSAPA

SEQ ID NO: 2396 - protein, 20 aa, Artificial Sequence
  Non-cyclic GFR-binding peptide
  MOD_RES (14)..(15): Xaa is C or S
LYLISIPELDQSVXXPSASA

SEQ ID NO: 2397 - protein, 12 aa, Artificial Sequence
  Non-cyclic GFR-binding peptide
IYLVSIPSLQTP

SEQ ID NO: 2398 - protein, 17 aa, Artificial Sequence
  Non-cyclic GFR-binding peptide
  MOD_RES (14)..(14): Xaa is C or S
LYLVSIPELKTPAXTPK

SEQ ID NO: 2399 - protein, 10 aa, Artificial Sequence
  Non-cyclic GFR-binding peptide
IYLVSIPSLK

SEQ ID NO: 2400 - protein, 11 aa, Artificial Sequence
  Non-cyclic GFR-binding peptide
LYLISIPELAQ

SEQ ID NO: 2401 - protein, 16 aa, Artificial Sequence
  Non-cyclic GFR-binding peptide
  MOD_RES (14)..(15): Xaa is C or S
KYLISIPSLRAPVXXS

SEQ ID NO: 2402 - protein, 17 aa, Artificial Sequence
  Non-cyclic GFR-binding peptide
  MOD_RES (14)..(15): Xaa is C or S
LYLVSIPELKTPAXXAK

SEQ ID NO: 2403 - protein, 10 aa, Artificial Sequence
  Non-cyclic GFR-binding peptide
LYLISIPELR

SEQ ID NO: 2404 - protein, 13 aa, Artificial Sequence
  Non-cyclic GFR-binding peptide
FYLISIANLRAPV

SEQ ID NO: 2405 - protein, 20 aa, Artificial Sequence
  Non-cyclic GFR-binding peptide
  MOD_RES (14)..(15): Xaa is C or S
LYLMSIPELETPVXXAKPIS

SEQ ID NO: 2406 - protein, 20 aa, Artificial Sequence
  Non-cyclic GFR-binding peptide
  MOD_RES (14)..(15): Xaa is C or S
LYLISIPELRAPVXXSAPAA

SEQ ID NO: 2407 - protein, 20 aa, Artificial Sequence
  Non-cyclic GFR-binding peptide
  MOD_RES (14)..(14): Xaa is C or S
LYLVSIPELKTPAXTPKTVH

SEQ ID NO: 2408 - protein, 15 aa, Artificial Sequence
  Non-cyclic GFR-binding peptide
  MOD_RES (14)..(15): Xaa is C or S
KYLISIPSLRAPVXX

SEQ ID NO: 2409 - protein, 15 aa, Artificial Sequence
  Non-cyclic GFR-binding peptide
  MOD_RES (14)..(15): Xaa is C or S
LYLMSIPELETPVXX

SEQ ID NO: 2410 - protein, 15 aa, Artificial Sequence
  Non-cyclic GFR-binding peptide
  MOD_RES (14)..(14): Xaa is C or S
LYLVSIPELKTPAXT

SEQ ID NO: 2411 - protein, 15 aa, Artificial Sequence
  Non-cyclic GFR-binding peptide
  MOD_RES (14)..(15): Xaa is C or S
LYLISIPELDQPVXX

SEQ ID NO: 2412 - protein, 14 aa, Artificial Sequence
  Non-cyclic GFR-binding peptide
  MOD_RES (14)..(14): Xaa is C or S
LYLVSIPELQTPAX

SEQ ID NO: 2413 - protein, 11 aa, Artificial Sequence
  Non-cyclic GFR-binding peptide
IYLISIPSLDQ

SEQ ID NO: 2414 - protein, 18 aa, Artificial Sequence
  Non-cyclic GFR-binding peptide
  MOD_RES (14)..(15): Xaa is C or S
FYLISIANLRAPVXXSAP

SEQ ID NO: 2415 - protein, 19 aa, Artificial Sequence
  Non-cyclic GFR-binding peptide
  MOD_RES (14)..(15): Xaa is C or S
LYLISIPELAQPVXXPAAS

SEQ ID NO: 2416 - protein, 11 aa, Artificial Sequence
  Non-cyclic GFR-binding peptide
LYLVSIPELQT

SEQ ID NO: 2417 - protein, 13 aa, Artificial Sequence
  Non-cyclic GFR-binding peptide
LYLVSIPELKTPV

SEQ ID NO: 2418 - protein, 11 aa, Artificial Sequence
  Non-cyclic GFR-binding peptide
IYLMSIPSLET

SEQ ID NO: 2419 - protein, 13 aa, Artificial Sequence
  Non-cyclic GFR-binding peptide
KYLISIPSLRAPV

SEQ ID NO: 2420 - protein, 11 aa, Artificial Sequence
  Non-cyclic GFR-binding peptide
IYLVSIPSLKT

SEQ ID NO: 2421 - protein, 16 aa, Artificial Sequence
  Non-cyclic GFR-binding peptide
  MOD_RES (14)..(15): Xaa is C or S
LYLVSIPELKTPAXXP

SEQ ID NO: 2422 - protein, 17 aa, Artificial Sequence
  Non-cyclic GFR-binding peptide
  MOD_RES (14)..(15): Xaa is C or S
IYLMSIPSLETPVXXAK

SEQ ID NO: 2423 - protein, 15 aa, Artificial Sequence
  Non-cyclic GFR-binding peptide
  MOD_RES (14)..(15): Xaa is C or S
LYLVSIPELKTPVXX

SEQ ID NO: 2424 - protein, 17 aa, Artificial Sequence
  Non-cyclic GFR-binding peptide
  MOD_RES (14)..(15): Xaa is C or S
IYLISIPSLAQPVXXPA

SEQ ID NO: 2425 - protein, 15 aa, Artificial Sequence
  Non-cyclic GFR-binding peptide
  MOD_RES (14)..(15): Xaa is C or S
FYLISIANLRAPVXX

SEQ ID NO: 2426 - protein, 9 aa, Artificial Sequence
  Non-cyclic GFR-binding peptide
LYLMSIPEL

SEQ ID NO: 2427 - protein, 18 aa, Artificial Sequence
  Non-cyclic GFR-binding peptide
  MOD_RES (14)..(15): Xaa is C or S
IYLVSIPSLKTPVXXAKG

SEQ ID NO: 2428 - protein, 19 aa, Artificial Sequence
  Non-cyclic GFR-binding peptide
  MOD_RES (14)..(15): Xaa is C or S
LYLISIPELDQPVXXPSAS

SEQ ID NO: 2429 - protein, 20 aa, Artificial Sequence
  Non-cyclic GFR-binding peptide
  MOD_RES (14)..(15): Xaa is C or S
LYLVSIPELKTPVXXAKGVK

SEQ ID NO: 2430 - protein, 20 aa, Artificial Sequence
  Non-cyclic GFR-binding peptide
  MOD_RES (14)..(15): Xaa is C or S
IYLVSIPSLQTPAXXPKPVT

SEQ ID NO: 2431 - protein, 17 aa, Artificial Sequence
  Non-cyclic GFR-binding peptide
  MOD_RES (14)..(15): Xaa is C or S
LYLISIPELAQPVXXPA

SEQ ID NO: 2432 - protein, 18 aa, Artificial Sequence
  Non-cyclic GFR-binding peptide
  MOD_RES (14)..(15): Xaa is C or S
IYLISIPSLDQPVXXPSA

SEQ ID NO: 2433 - protein, 14 aa, Artificial Sequence
  Non-cyclic GFR-binding peptide
  MOD_RES (14)..(14): Xaa is C or S
IYLVSIPSLKTPVX

SEQ ID NO: 2434 - protein, 17 aa, Artificial Sequence
  Non-cyclic GFR-binding peptide
  MOD_RES (14)..(15): Xaa is C or S
IYLISIPSLDQPVXXPS

SEQ ID NO: 2435 - protein, 16 aa, Artificial Sequence
  Non-cyclic GFR-binding peptide
  MOD_RES (14)..(15): Xaa is C or S
IYLISIPSLAQPVXXP

SEQ ID NO: 2436 - protein, 20 aa, Artificial Sequence
  Non-cyclic GFR-binding peptide
  MOD_RES (14)..(15): Xaa is C or S
IYLVSIPSLKTPAXXAKPVA

SEQ ID NO: 2437 - protein, 16 aa, Artificial Sequence
  Non-cyclic GFR-binding peptide
  MOD_RES (14)..(15): Xaa is C or S
LYLVSIPELQTPAXXP

SEQ ID NO: 2438 - protein, 20 aa, Artificial Sequence
  Non-cyclic GFR-binding peptide
  MOD_RES (14)..(15): Xaa is C or S
LYLVSIPELQTPAXXPKPVT

SEQ ID NO: 2439 - protein, 19 aa, Artificial Sequence
  Non-cyclic GFR-binding peptide
  MOD_RES (14)..(15): Xaa is C or S
LYLVSIPELQTPAXXPKPV

SEQ ID NO: 2440 - protein, 19 aa, Artificial Sequence
  Non-cyclic GFR-binding peptide
  MOD_RES (14)..(15): Xaa is C or S
IYLISIPSLDQSVXXPSAS

SEQ ID NO: 2441 - protein, 17 aa, Artificial Sequence
  Non-cyclic GFR-binding peptide
  MOD_RES (14)..(15): Xaa is C or S
LYLVSIPELKTPAXXPK

SEQ ID NO: 2442 - protein, 11 aa, Artificial Sequence
  Non-cyclic GFR-binding peptide
LYLVSIPELKT

SEQ ID NO: 2443 - protein, 18 aa, Artificial Sequence
  Non-cyclic GFR-binding peptide
  MOD_RES (14)..(15): Xaa is C or S
LYLISIPELDQPVXXPSA

SEQ ID NO: 2444 - protein, 20 aa, Artificial Sequence
  Non-cyclic GFR-binding peptide
  MOD_RES (14)..(15): Xaa is C or S
LYLISIPELAQPVXXPAASA

SEQ ID NO: 2445 - protein, 13 aa, Artificial Sequence
  Non-cyclic GFR-binding peptide
FYLISIANLKTPV

SEQ ID NO: 2446 - protein, 20 aa, Artificial Sequence
  Non-cyclic GFR-binding peptide
  MOD_RES (14)..(15): Xaa is C or S
IYLVSIPSLKTPVXXAKGVK

SEQ ID NO: 2447 - protein, 15 aa, Artificial Sequence
  Non-cyclic GFR-binding peptide
  MOD_RES (14)..(15): Xaa is C or S
FYLISIANLKTPVXX

SEQ ID NO: 2448 - protein, 17 aa, Artificial Sequence
  Non-cyclic GFR-binding peptide
  MOD_RES (14)..(15): Xaa is C or S
LYLMSIPELETPVXXAK

SEQ ID NO: 2449 - protein, 12 aa, Artificial Sequence
  Non-cyclic GFR-binding peptide
KYLISIPSLRAP

SEQ ID NO: 2450 - protein, 15 aa, Artificial Sequence
  Non-cyclic GFR-binding peptide
  MOD_RES (14)..(14): Xaa is C or S
IYLVSIPSLKTPAXT

SEQ ID NO: 2451 - protein, 12 aa, Artificial Sequence
  Non-cyclic GFR-binding peptide
IYLMSIPSLETP

SEQ ID NO: 2452 - protein, 9 aa, Artificial Sequence
  Non-cyclic GFR-binding peptide
IYLMSIPSL

SEQ ID NO: 2453 - protein, 13 aa, Artificial Sequence
  Non-cyclic GFR-binding peptide
LYLVSIPELKTPA

SEQ ID NO: 2454 - protein, 10 aa, Artificial Sequence
  Non-cyclic GFR-binding peptide
KYLISIPSLK

SEQ ID NO: 2455 - protein, 10 aa, Artificial Sequence
  Non-cyclic GFR-binding peptide
IYLISIPSLK

SEQ ID NO: 2456 - protein, 11 aa, Artificial Sequence
  Non-cyclic GFR-binding peptide
LYLISIPELRA

SEQ ID NO: 2457 - protein, 15 aa, Artificial Sequence
  Non-cyclic GFR-binding peptide
  MOD_RES (14)..(15): Xaa is C or S
IYLMSIPSLETPVXX

SEQ ID NO: 2458 - protein, 20 aa, Artificial Sequence
  Non-cyclic GFR-binding peptide
  MOD_RES (14)..(15): Xaa is C or S
IYLISIPSLDQPVXXPSASA

SEQ ID NO: 2459 - protein, 17 aa, Artificial Sequence
  Non-cyclic GFR-binding peptide
  MOD_RES (14)..(15): Xaa is C or S
LYLVSIPELKTPVXXAK

SEQ ID NO: 2460 - protein, 14 aa, Artificial Sequence
  Non-cyclic GFR-binding peptide
  MOD_RES (14)..(14): Xaa is C or S
LYLISIPELAQPVX

SEQ ID NO: 2461 - protein, 14 aa, Artificial Sequence
  Non-cyclic GFR-binding peptide
  MOD_RES (14)..(14): Xaa is C or S
IYLMSIPSLETPVX

SEQ ID NO: 2462 - protein, 16 aa, Artificial Sequence
  Non-cyclic GFR-binding peptide
  MOD_RES (14)..(15): Xaa is C or S
IYLISIPSLDQSVXXP

SEQ ID NO: 2463 - protein, 14 aa, Artificial Sequence
  Non-cyclic GFR-binding peptide
  MOD_RES (14)..(14): Xaa is C or S
LYLVSIPELKTPAX

SEQ ID NO: 2464 - protein, 18 aa, Artificial Sequence
  Non-cyclic GFR-binding peptide
  MOD_RES (14)..(14): Xaa is C or S
LYLVSIPELKTPAXTPKT

SEQ ID NO: 2465 - protein, 18 aa, Artificial Sequence
  Non-cyclic GFR-binding peptide
  MOD_RES (14)..(15): Xaa is C or S
KYLISIPSLKTPVXXAKS

SEQ ID NO: 2466 - protein, 18 aa, Artificial Sequence
  Non-cyclic GFR-binding peptide
  MOD_RES (14)..(15): Xaa is C or S
IYLISIPSLKTPVXXAKS

SEQ ID NO: 2467 - protein, 17 aa, Artificial Sequence
  Non-cyclic GFR-binding peptide
  MOD_RES (14)..(15): Xaa is C or S
LYLVSIPELQTPAXXPK

SEQ ID NO: 2468 - protein, 12 aa, Artificial Sequence
  Non-cyclic GFR-binding peptide
LYLISIPELDQP

SEQ ID NO: 2469 - protein, 14 aa, Artificial Sequence
  Non-cyclic GFR-binding peptide
  MOD_RES (14)..(14): Xaa is C or S
KYLISIPSLRAPVX

SEQ ID NO: 2470 - protein, 12 aa, Artificial Sequence
  Non-cyclic GFR-binding peptide
IYLVSIPSLKTP

SEQ ID NO: 2471 - protein, 20 aa, Artificial Sequence
  Non-cyclic GFR-binding peptide
  MOD_RES (14)..(15): Xaa is C or S
LYLMSIPELETPVXXAKPIK

SEQ ID NO: 2472 - protein, 16 aa, Artificial Sequence
  Non-cyclic GFR-binding peptide
  MOD_RES (14)..(15): Xaa is C or S
LYLVSIPELKTPVXXA

SEQ ID NO: 2473 - protein, 16 aa, Artificial Sequence
  Non-cyclic GFR-binding peptide
  MOD_RES (14)..(15): Xaa is C or S
LYLMSIPELETPVXXA

SEQ ID NO: 2474 - protein, 17 aa, Artificial Sequence
  Non-cyclic GFR-binding peptide
  MOD_RES (14)..(15): Xaa is C or S
FYLISIANLKTPVXXAK

SEQ ID NO: 2475 - protein, 18 aa, Artificial Sequence
  Non-cyclic GFR-binding peptide
  MOD_RES (14)..(15): Xaa is C or S
LYLVSIPELQTPAXXPKP

SEQ ID NO: 2476 - protein, 20 aa, Artificial Sequence
  Non-cyclic GFR-binding peptide
  MOD_RES (14)..(15): Xaa is C or S
KYLISIPSLRAPVXXSAPAA

SEQ ID NO: 2477 - protein, 14 aa, Artificial Sequence
  Non-cyclic GFR-binding peptide
  MOD_RES (14)..(14): Xaa is C or S
LYLISIPELDQPVX

SEQ ID NO: 2478 - protein, 13 aa, Artificial Sequence
  Non-cyclic GFR-binding peptide
LYLVSIPELQTPA

SEQ ID NO: 2479 - protein, 16 aa, Artificial Sequence
  Non-cyclic GFR-binding peptide
  MOD_RES (14)..(15): Xaa is C or S
LYLISIPELRAPVXXS

SEQ ID NO: 2480 - protein, 15 aa, Artificial Sequence
  Non-cyclic GFR-binding peptide
  MOD_RES (14)..(15): Xaa is C or S
LYLVSIPELQTPAXX

SEQ ID NO: 2481 - protein, 19 aa, Artificial Sequence
  Non-cyclic GFR-binding peptide
  MOD_RES (14)..(15): Xaa is C or S
LYLVSIPELKTPAXXAKPV

SEQ ID NO: 2482 - protein, 11 aa, Artificial Sequence
  Non-cyclic GFR-binding peptide
FYLISIANLKT

SEQ ID NO: 2483 - protein, 19 aa, Artificial Sequence
  Non-cyclic GFR-binding peptide
  MOD_RES (14)..(14): Xaa is C or S
LYLVSIPELKTPAXTPKTV

SEQ ID NO: 2484 - protein, 12 aa, Artificial Sequence
  Non-cyclic GFR-binding peptide
IYLISIPSLKTP

SEQ ID NO: 2485 - protein, 17 aa, Artificial Sequence
  Non-cyclic GFR-binding peptide
  MOD_RES (14)..(15): Xaa is C or S
IYLISIPSLDQSVXXPS

SEQ ID NO: 2486 - protein, 20 aa, Artificial Sequence
  Non-cyclic GFR-binding peptide
  MOD_RES (14)..(15): Xaa is C or S
KYLISIPSLKTPVXXAKSAK

SEQ ID NO: 2487 - protein, 20 aa, Artificial Sequence
  Non-cyclic GFR-binding peptide
  MOD_RES (14)..(15): Xaa is C or S
IYLISIPSLKTPVXXAKSAK

SEQ ID NO: 2488 - protein, 13 aa, Artificial Sequence
  Non-cyclic GFR-binding peptide
LYLISIPELRAPV

SEQ ID NO: 2489 - protein, 15 aa, Artificial Sequence
  Non-cyclic GFR-binding peptide
  MOD_RES (14)..(15): Xaa is C or S
IYLVSIPSLKTPAXX

SEQ ID NO: 2490 - protein, 20 aa, Artificial Sequence
  Non-cyclic GFR-binding peptide
  MOD_RES (14)..(15): Xaa is C or S
FYLISIANLRAPVXXSAPAA

SEQ ID NO: 2491 - protein, 19 aa, Artificial Sequence
  Non-cyclic GFR-binding peptide
  MOD_RES (14)..(15): Xaa is C or S
LYLISIPELRAPVXXSAPA

SEQ ID NO: 2492 - protein, 16 aa, Artificial Sequence
  Non-cyclic GFR-binding peptide
  MOD_RES (14)..(15): Xaa is C or S
IYLVSIPSLKTPAXXP

SEQ ID NO: 2493 - protein, 19 aa, Artificial Sequence
  Non-cyclic GFR-binding peptide
  MOD_RES (14)..(15): Xaa is C or S
IYLISIPSLAQPVXXPAAS

SEQ ID NO: 2494 - protein, 18 aa, Artificial Sequence
  Non-cyclic GFR-binding peptide
  MOD_RES (14)..(15): Xaa is C or S
LYLMSIPELETPVXXAKP

SEQ ID NO: 2495 - protein, 18 aa, Artificial Sequence
  Non-cyclic GFR-binding peptide
  MOD_RES (14)..(15): Xaa is C or S
LYLISIPELDQSVXXPSA

SEQ ID NO: 2496 - protein, 19 aa, Artificial Sequence
  Non-cyclic GFR-binding peptide
  MOD_RES (14)..(15): Xaa is C or S
IYLMSIPSLETPVXXAKPI

SEQ ID NO: 2497 - protein, 13 aa, Artificial Sequence
  Non-cyclic GFR-binding peptide
IYLISIPSLDQPV

SEQ ID NO: 2498 - protein, 10 aa, Artificial Sequence
  Non-cyclic GFR-binding peptide
LYLMSIPELE

SEQ ID NO: 2499 - protein, 17 aa, Artificial Sequence
  Non-cyclic GFR-binding peptide
  MOD_RES (14)..(15): Xaa is C or S
KYLISIPSLRAPVXXSA

SEQ ID NO: 2500 - protein, 14 aa, Artificial Sequence
  Non-cyclic GFR-binding peptide
  MOD_RES (14)..(14): Xaa is C or S
IYLVSIPSLQTPAX

SEQ ID NO: 2501 - protein, 12 aa, Artificial Sequence
  Non-cyclic GFR-binding peptide
LYLISIPELAQP

SEQ ID NO: 2502 - protein, 12 aa, Artificial Sequence
  Non-cyclic GFR-binding peptide
KYLISIPSLKTP

SEQ ID NO: 2503 - protein, 16 aa, Artificial Sequence
  Non-cyclic GFR-binding peptide
  MOD_RES (14)..(15): Xaa is C or S
IYLMSIPSLETPVXXA

SEQ ID NO: 2504 - protein, 15 aa, Artificial Sequence
  Non-cyclic GFR-binding peptide
  MOD_RES (14)..(15): Xaa is C or S
IYLVSIPSLKTPVXX

SEQ ID NO: 2505 - protein, 11 aa, Artificial Sequence
  Non-cyclic GFR-binding peptide
KYLISIPSLRA

SEQ ID NO: 2506 - protein, 14 aa, Artificial Sequence
  Non-cyclic GFR-binding peptide
  MOD_RES (14)..(14): Xaa is C or S
IYLISIPSLDQSVX

SEQ ID NO: 2507 - protein, 13 aa, Artificial Sequence
  Non-cyclic GFR-binding peptide
IYLMSIPSLETPV

SEQ ID NO: 2508 - protein, 18 aa, Artificial Sequence
  Non-cyclic GFR-binding peptide
  MOD_RES (14)..(15): Xaa is C or S
LYLVSIPELKTPAXXPKP

SEQ ID NO: 2509 - protein, 20 aa, Artificial Sequence
  Non-cyclic GFR-binding peptide
  MOD_RES (14)..(15): Xaa is C or S
IYLMSIPSLETPVXXAKPIS

SEQ ID NO: 2510 - protein, 13 aa, Artificial Sequence
  Non-cyclic GFR-binding peptide
IYLVSIPSLKTPV

SEQ ID NO: 2511 - protein, 19 aa, Artificial Sequence
  Non-cyclic GFR-binding peptide
  MOD_RES (14)..(15): Xaa is C or S
IYLVSIPSLKTPAXXAKPV

SEQ ID NO: 2512 - protein, 18 aa, Artificial Sequence
  Non-cyclic GFR-binding peptide
  MOD_RES (14)..(15): Xaa is C or S
LYLVSIPELKTPVXXAKG

SEQ ID NO: 2513 - protein, 11 aa, Artificial Sequence
  Non-cyclic GFR-binding peptide
FYLISIANLRA

SEQ ID NO: 2514 - protein, 19 aa, Artificial Sequence
  Non-cyclic GFR-binding peptide
  MOD_RES (14)..(15): Xaa is C or S
IYLISIPSLDQPVXXPSAS

SEQ ID NO: 2515 - protein, 16 aa, Artificial Sequence
  Non-cyclic GFR-binding peptide
  MOD_RES (14)..(15): Xaa is C or S
IYLISIPSLKTPVXXA

SEQ ID NO: 2516 - protein, 20 aa, Artificial Sequence
  Non-cyclic GFR-binding peptide
  MOD_RES (14)..(15): Xaa is C or S
FYLISIANLKTPVXXAKSAK

SEQ ID NO: 2517 - protein, 16 aa, Artificial Sequence
  Non-cyclic GFR-binding peptide
  MOD_RES (14)..(15): Xaa is C or S
KYLISIPSLKTPVXXA

SEQ ID NO: 2518 - protein, 20 aa, Artificial Sequence
  Non-cyclic GFR-binding peptide
  MOD_RES (14)..(15): Xaa is C or S
IYLVSIPSLKTPAXXPKPVY

SEQ ID NO: 2519 - protein, 13 aa, Artificial Sequence
  Non-cyclic GFR-binding peptide
LYLISIPELAQPV

SEQ ID NO: 2520 - protein, 16 aa, Artificial Sequence
  Non-cyclic GFR-binding peptide
  MOD_RES (14)..(15): Xaa is C or S
FYLISIANLKTPVXXA

SEQ ID NO: 2521 - protein, 11 aa, Artificial Sequence
  Non-cyclic GFR-binding peptide
LYLMSIPELET

SEQ ID NO: 2522 - protein, 15 aa, Artificial Sequence
  Non-cyclic GFR-binding peptide
  MOD_RES (14)..(15): Xaa is C or S
LYLISIPELRAPVXX

SEQ ID NO: 2523 - protein, 12 aa, Artificial Sequence
  Non-cyclic GFR-binding peptide
LYLISIPELRAP

SEQ ID NO: 2524 - protein, 18 aa, Artificial Sequence
  Non-cyclic GFR-binding peptide
  MOD_RES (14)..(15): Xaa is C or S
LYLVSIPELKTPAXXAKP

SEQ ID NO: 2525 - protein, 11 aa, Artificial Sequence
  Non-cyclic GFR-binding peptide
IYLVSIPSLQT

SEQ ID NO: 2526 - protein, 19 aa, Artificial Sequence
  Non-cyclic GFR-binding peptide
  MOD_RES (14)..(15): Xaa is C or S
KYLISIPSLKTPVXXAKSA

SEQ ID NO: 2527 - protein, 19 aa, Artificial Sequence
  Non-cyclic GFR-binding peptide
  MOD_RES (14)..(15): Xaa is C or S
IYLISIPSLKTPVXXAKSA

SEQ ID NO: 2528 - protein, 17 aa, Artificial Sequence
  Non-cyclic GFR-binding peptide
  MOD_RES (14)..(15): Xaa is C or S
FYLISIANLRAPVXXSA

SEQ ID NO: 2529 - protein, 19 aa, Artificial Sequence
  Non-cyclic GFR-binding peptide
  MOD_RES (14)..(15): Xaa is C or S
IYLVSIPSLQTPAXXPKPV

SEQ ID NO: 2530 - protein, 11 aa, Artificial Sequence
  Non-cyclic GFR-binding peptide
LYLISIPELDQ

SEQ ID NO: 2531 - protein, 19 aa, Artificial Sequence
  Non-cyclic GFR-binding peptide
  MOD_RES (14)..(15): Xaa is C or S
FYLISIANLKTPVXXAKSA

SEQ ID NO: 2532 - protein, 12 aa, Artificial Sequence
  Non-cyclic GFR-binding peptide
LYLISIPELDQS

SEQ ID NO: 2533 - protein, 16 aa, Artificial Sequence
  Non-cyclic GFR-binding peptide
  MOD_RES (14)..(15): Xaa is C or S
IYLVSIPSLKTPAXXA

SEQ ID NO: 2534 - protein, 9 aa, Artificial Sequence
  Non-cyclic GFR-binding peptide
IYLVSIPSL

SEQ ID NO: 2535 - protein, 12 aa, Artificial Sequence
  Non-cyclic GFR-binding peptide
FYLISIANLKTP

SEQ ID NO: 2536 - protein, 16 aa, Artificial Sequence
  Non-cyclic GFR-binding peptide
  MOD_RES (14)..(14): Xaa is C or S
IYLVSIPSLKTPAXTP

SEQ ID NO: 2537 - protein, 17 aa, Artificial Sequence
  Non-cyclic GFR-binding peptide
  MOD_RES (14)..(15): Xaa is C or S
IYLVSIPSLKTPVXXAK

SEQ ID NO: 2538 - protein, 19 aa, Artificial Sequence
  Non-cyclic GFR-binding peptide
  MOD_RES (14)..(15): Xaa is C or S
IYLVSIPSLKTPAXXPKPV

SEQ ID NO: 2539 - protein, 10 aa, Artificial Sequence
  Non-cyclic GFR-binding peptide
LYLISIPELA

SEQ ID NO: 2540 - protein, 16 aa, Artificial Sequence
  Non-cyclic GFR-binding peptide
  MOD_RES (14)..(15): Xaa is C or S
IYLISIPSLDQPVXXP

SEQ ID NO: 2541 - protein, 10 aa, Artificial Sequence
  Non-cyclic GFR-binding peptide
IYLVSIPSLQ

SEQ ID NO: 2542 - protein, 15 aa, Artificial Sequence
  Non-cyclic GFR-binding peptide
  MOD_RES (14)..(15): Xaa is C or S
LYLISIPELAQPVXX

SEQ ID NO: 2543 - protein, 13 aa, Artificial Sequence
  Non-cyclic GFR-binding peptide
IYLISIPSLDQSV

SEQ ID NO: 2544 - protein, 15 aa, Artificial Sequence
  Non-cyclic GFR-binding peptide
  MOD_RES (14)..(15): Xaa is C or S
IYLISIPSLDQSVXX

SEQ ID NO: 2545 - protein, 18 aa, Artificial Sequence
  Non-cyclic GFR-binding peptide
  MOD_RES (14)..(15): Xaa is C or S
KYLISIPSLRAPVXXSAP

SEQ ID NO: 2546 - protein, 20 aa, Artificial Sequence
  Non-cyclic GFR-binding peptide
  MOD_RES (14)..(15): Xaa is C or S
IYLISIPSLDQSVXXPSASA

SEQ ID NO: 2547 - protein, 11 aa, Artificial Sequence
  Non-cyclic GFR-binding peptide
IYLISIPSLAQ

SEQ ID NO: 2548 - protein, 17 aa, Artificial Sequence
  Non-cyclic GFR-binding peptide
  MOD_RES (14)..(14): Xaa is C or S
IYLVSIPSLKTPAXTPK

SEQ ID NO: 2549 - protein, 20 aa, Artificial Sequence
  Non-cyclic GFR-binding peptide
  MOD_RES (14)..(15): Xaa is C or S
LYLVSIPELKTPAXXAKPVA

SEQ ID NO: 2550 - protein, 16 aa, Artificial Sequence
  Non-cyclic GFR-binding peptide
  MOD_RES (14)..(15): Xaa is C or S
IYLVSIPSLQTPAXXP

SEQ ID NO: 2551 - protein, 15 aa, Artificial Sequence
  Non-cyclic GFR-binding peptide
  MOD_RES (14)..(15): Xaa is C or S
IYLISIPSLAQPVXX

SEQ ID NO: 2552 - protein, 18 aa, Artificial Sequence
  Non-cyclic GFR-binding peptide
  MOD_RES (14)..(15): Xaa is C or S
LYLISIPELAQPVXXPAA

SEQ ID NO: 2553 - protein, 12 aa, Artificial Sequence
  Non-cyclic GFR-binding peptide
LYLVSIPELKTP

SEQ ID NO: 2554 - protein, 15 aa, Artificial Sequence
  Non-cyclic GFR-binding peptide
  MOD_RES (14)..(15): Xaa is C or S
IYLISIPSLKTPVXX

SEQ ID NO: 2555 - protein, 15 aa, Artificial Sequence
  Non-cyclic GFR-binding peptide
  MOD_RES (14)..(15): Xaa is C or S
KYLISIPSLKTPVXX

SEQ ID NO: 2556 - protein, 17 aa, Artificial Sequence
  Non-cyclic GFR-binding peptide
  MOD_RES (14)..(15): Xaa is C or S
LYLISIPELDQPVXXPS

SEQ ID NO: 2557 - protein, 14 aa, Artificial Sequence
  Non-cyclic GFR-binding peptide
  MOD_RES (14)..(14): Xaa is C or S
LYLISIPELRAPVX

SEQ ID NO: 2558 - protein, 18 aa, Artificial Sequence
  Non-cyclic GFR-binding peptide
  MOD_RES (14)..(15): Xaa is C or S
IYLISIPSLAQPVXXPAA

SEQ ID NO: 2559 - protein, 14 aa, Artificial Sequence
  Non-cyclic GFR-binding peptide
  MOD_RES (14)..(14): Xaa is C or S
LYLMSIPELETPVX

SEQ ID NO: 2560 - protein, 16 aa, Artificial Sequence
  Non-cyclic GFR-binding peptide
  MOD_RES (14)..(15): Xaa is C or S
LYLISIPELDQSVXXP

SEQ ID NO: 2561 - protein, 14 aa, Artificial Sequence
  Non-cyclic GFR-binding peptide
  MOD_RES (14)..(14): Xaa is C or S
IYLVSIPSLKTPAX

SEQ ID NO: 2562 - protein, 16 aa, Artificial Sequence
  Non-cyclic GFR-binding peptide
  MOD_RES (14)..(15): Xaa is C or S
LYLISIPELAQPVXXP

SEQ ID NO: 2563 - protein, 18 aa, Artificial Sequence
  Non-cyclic GFR-binding peptide
  MOD_RES (14)..(15): Xaa is C or S
IYLVSIPSLQTPAXXPKP

SEQ ID NO: 2564 - protein, 20 aa, Artificial Sequence
  Non-cyclic GFR-binding peptide
  MOD_RES (14)..(15): Xaa is C or S
LYLISIPELDQPVXXPSASA

SEQ ID NO: 2565 - protein, 10 aa, Artificial Sequence
  Non-cyclic GFR-binding peptide
FYLISIANLK

SEQ ID NO: 2566 - protein, 13 aa, Artificial Sequence
  Non-cyclic GFR-binding peptide
IYLVSIPSLQTPA

SEQ ID NO: 2567 - protein, 13 aa, Artificial Sequence
  Non-cyclic GFR-binding peptide
IYLISIPSLKTPV

SEQ ID NO: 2568 - protein, 10 aa, Artificial Sequence
  Non-cyclic GFR-binding peptide
IYLISIPSLA

SEQ ID NO: 2569 - protein, 14 aa, Artificial Sequence
  Non-cyclic GFR-binding peptide
  MOD_RES (14)..(14): Xaa is C or S
LYLVSIPELKTPVX

SEQ ID NO: 2570 - protein, 13 aa, Artificial Sequence
  Non-cyclic GFR-binding peptide
KYLISIPSLKTPV

SEQ ID NO: 2571 - protein, 16 aa, Artificial Sequence
  Non-cyclic GFR-binding peptide
  MOD_RES (14)..(15): Xaa is C or S
LYLVSIPELKTPAXXA

SEQ ID NO: 2572 - protein, 10 aa, Artificial Sequence
  Non-cyclic GFR-binding peptide
KYLISIPSLR

SEQ ID NO: 2573 - protein, 17 aa, Artificial Sequence
  Non-cyclic GFR-binding peptide
  MOD_RES (14)..(15): Xaa is C or S
IYLVSIPSLKTPAXXAK

SEQ ID NO: 2574 - protein, 13 aa, Artificial Sequence
  Non-cyclic GFR-binding peptide
IYLISIPSLAQPV

SEQ ID NO: 2575 - protein, 15 aa, Artificial Sequence
  Non-cyclic GFR-binding peptide
  MOD_RES (14)..(15): Xaa is C or S
IYLVSIPSLQTPAXX

SEQ ID NO: 2576 - protein, 12 aa, Artificial Sequence
  Non-cyclic GFR-binding peptide
IYLISIPSLDQP

SEQ ID NO: 2577 - protein, 15 aa, Artificial Sequence
  Non-cyclic GFR-binding peptide
  MOD_RES (14)..(15): Xaa is C or S
LYLISIPELDQSVXX

SEQ ID NO: 2578 - protein, 14 aa, Artificial Sequence
  Non-cyclic GFR-binding peptide
  MOD_RES (14)..(14): Xaa is C or S
IYLISIPSLDQPVX

SEQ ID NO: 2579 - protein, 13 aa, Artificial Sequence
  Non-cyclic GFR-binding peptide
LYLISIPELDQSV

SEQ ID NO: 2580 - protein, 18 aa, Artificial Sequence
  Non-cyclic GFR-binding peptide
  MOD_RES (14)..(15): Xaa is C or S
LYLISIPELRAPVXXSAP

SEQ ID NO: 2581 - protein, 19 aa, Artificial Sequence
  Non-cyclic GFR-binding peptide
  MOD_RES (14)..(14): Xaa is C or S
IYLVSIPSLKTPAXTPKTV

SEQ ID NO: 2582 - protein, 18 aa, Artificial Sequence
  Non-cyclic GFR-binding peptide
  MOD_RES (14)..(14): Xaa is C or S
IYLVSIPSLKTPAXTPKT

SEQ ID NO: 2583 - protein, 18 aa, Artificial Sequence
  Non-cyclic GFR-binding peptide
  MOD_RES (14)..(15): Xaa is C or S
IYLVSIPSLKTPAXXAKP

SEQ ID NO: 2584 - protein, 10 aa, Artificial Sequence
  Non-cyclic GFR-binding peptide
LYLVSIPELQ

SEQ ID NO: 2585 - protein, 15 aa, Artificial Sequence
  Non-cyclic GFR-binding peptide
  MOD_RES (14)..(15): Xaa is C or S
IYLISIPSLDQPVXX

SEQ ID NO: 2586 - protein, 20 aa, Artificial Sequence
  Non-cyclic GFR-binding peptide
  MOD_RES (14)..(15): Xaa is C or S
IYLISIPSLAQPVXXPAASA

SEQ ID NO: 2587 - protein, 20 aa, Artificial Sequence
  Non-cyclic GFR-binding peptide
  MOD_RES (14)..(15): Xaa is C or S
IYLMSIPSLETPVXXAKPIK

SEQ ID NO: 2588 - protein, 16 aa, Artificial Sequence
  Non-cyclic GFR-binding peptide
  MOD_RES (14)..(15): Xaa is C or S
IYLVSIPSLKTPVXXA

SEQ ID NO: 2589 - protein, 18 aa, Artificial Sequence
  Non-cyclic GFR-binding peptide
  MOD_RES (14)..(15): Xaa is C or S
FYLISIANLKTPVXXAKS

SEQ ID NO: 2590 - protein, 12 aa, Artificial Sequence
  Non-cyclic GFR-binding peptide
IYLISIPSLDQS

SEQ ID NO: 2591 - protein, 19 aa, Artificial Sequence
  Non-cyclic GFR-binding peptide
  MOD_RES (14)..(15): Xaa is C or S
LYLISIPELDQSVXXPSAS

SEQ ID NO: 2592 - protein, 17 aa, Artificial Sequence
  Non-cyclic GFR-binding peptide
  MOD_RES (14)..(15): Xaa is C or S
IYLVSIPSLKTPAXXPK

SEQ ID NO: 2593 - protein, 12 aa, Artificial Sequence
  Non-cyclic GFR-binding peptide
LYLMSIPELETP

SEQ ID NO: 2594 - protein, 17 aa, Artificial Sequence
  Non-cyclic GFR-binding peptide
  MOD_RES (14)..(15): Xaa is C or S
IYLVSIPSLQTPAXXPK

SEQ ID NO: 2595 - protein, 14 aa, Artificial Sequence
  Non-cyclic GFR-binding peptide
  MOD_RES (14)..(14): Xaa is C or S
FYLISIANLRAPVX

SEQ ID NO: 2596 - protein, 14 aa, Artificial Sequence
  Non-cyclic GFR-binding peptide
  MOD_RES (14)..(14): Xaa is C or S
IYLISIPSLAQPVX

SEQ ID NO: 2597 - protein, 19 aa, Artificial Sequence
  Non-cyclic GFR-binding peptide
  MOD_RES (14)..(15): Xaa is C or S
IYLVSIPSLKTPVXXAKGV

SEQ ID NO: 2598 - protein, 18 aa, Artificial Sequence
  Non-cyclic GFR-binding peptide
  MOD_RES (14)..(15): Xaa is C or S
IYLVSIPSLKTPAXXPKP

SEQ ID NO: 2599 - protein, 19 aa, Artificial Sequence
  Non-cyclic GFR-binding peptide
  MOD_RES (14)..(15): Xaa is C or S
LYLMSIPELETPVXXAKPI

SEQ ID NO: 2600 - protein, 10 aa, Artificial Sequence
  Non-cyclic GFR-binding peptide
IYLISIPSLD

SEQ ID NO: 2601 - protein, 20 aa, Artificial Sequence
  Non-cyclic GFR-binding peptide
  MOD_RES (14)..(14): Xaa is C or S
IYLVSIPSLKTPAXTPKTVH

SEQ ID NO: 2602 - protein, 13 aa, Artificial Sequence
  Non-cyclic GFR-binding peptide
IYLVSIPSLKTPA

SEQ ID NO: 2603 - protein, 20 aa, Artificial Sequence
  Non-cyclic GFR-binding peptide
  MOD_RES (14)..(15): Xaa is C or S
LYLVSIPELKTPAXXPKPVY

SEQ ID NO: 2604 - protein, 11 aa, Artificial Sequence
  Non-cyclic GFR-binding peptide
KYLISIPSLKT

SEQ ID NO: 2605 - protein, 17 aa, Artificial Sequence
  Non-cyclic GFR-binding peptide
  MOD_RES (14)..(15): Xaa is C or S
KYLISIPSLKTPVXXAK

SEQ ID NO: 2606 - protein, 17 aa, Artificial Sequence
  Non-cyclic GFR-binding peptide
  MOD_RES (14)..(15): Xaa is C or S
IYLISIPSLKTPVXXAK

SEQ ID NO: 2607 - protein, 12 aa, Artificial Sequence
  Non-cyclic GFR-binding peptide
LYLVSIPELQTP

SEQ ID NO: 2608 - protein, 11 aa, Artificial Sequence
  Non-cyclic GFR-binding peptide
IYLISIPSLKT

SEQ ID NO: 2609 - protein, 10 aa, Artificial Sequence
  Non-cyclic GFR-binding peptide
LYLVSIPELK

SEQ ID NO: 2610 - protein, 10 aa, Artificial Sequence
  Non-cyclic GFR-binding peptide
ELSPISMLYI

SEQ ID NO: 2611 - protein, 18 aa, Artificial Sequence
  Non-cyclic GFR-binding peptide
  MOD_RES (4)..(5): Xaa is C or S
ASPXXVSQDLSPISILYI

SEQ ID NO: 2612 - protein, 13 aa, Artificial Sequence
  Non-cyclic GFR-binding peptide
VPQDLEPISILYL

SEQ ID NO: 2613 - protein, 14 aa, Artificial Sequence
  Non-cyclic GFR-binding peptide
  MOD_RES (1)..(1): Xaa is C or S
XVPTKLNAISILYF

SEQ ID NO: 2614 - protein, 13 aa, Artificial Sequence
  Non-cyclic GFR-binding peptide
VPTELEPISMLYL

SEQ ID NO: 2615 - protein, 15 aa, Artificial Sequence
  Non-cyclic GFR-binding peptide
  MOD_RES (1)..(2): Xaa is C or S
XXAPTKLEPISVLYL

SEQ ID NO: 2616 - protein, 19 aa, Artificial Sequence
  Non-cyclic GFR-binding peptide
  MOD_RES (5)..(6): Xaa is C or S
APASXXVPARLSPISILYK

SEQ ID NO: 2617 - protein, 14 aa, Artificial Sequence
  Non-cyclic GFR-binding peptide
  MOD_RES (1)..(1): Xaa is C or S
XVSQDLEPISILYL

SEQ ID NO: 2618 - protein, 16 aa, Artificial Sequence
  Non-cyclic GFR-binding peptide
  MOD_RES (3)..(3): Xaa is C or S
PTXAPTKLEPISVLYL

SEQ ID NO: 2619 - protein, 19 aa, Artificial Sequence
  Non-cyclic GFR-binding peptide
  MOD_RES (5)..(6): Xaa is C or S
VPKPXXAPTKLEPISVLYL

SEQ ID NO: 2620 - protein, 10 aa, Artificial Sequence
  Non-cyclic GFR-binding peptide
DLEPISILYL

SEQ ID NO: 2621 - protein, 17 aa, Artificial Sequence
  Non-cyclic GFR-binding peptide
  MOD_RES (3)..(4): Xaa is C or S
ASXXVPARLEPISILYL

SEQ ID NO: 2622 - protein, 12 aa, Artificial Sequence
  Non-cyclic GFR-binding peptide
PQALSPISILYI

SEQ ID NO: 2623 - protein, 12 aa, Artificial Sequence
  Non-cyclic GFR-binding peptide
PARLNAISILYF

SEQ ID NO: 2624 - protein, 18 aa, Artificial Sequence
  Non-cyclic GFR-binding peptide
  MOD_RES (4)..(5): Xaa is C or S
PKAXXVPTELSPISMLYI

SEQ ID NO: 2625 - protein, 14 aa, Artificial Sequence
  Non-cyclic GFR-binding peptide
  MOD_RES (1)..(1): Xaa is C or S
XVPTKLSPISILYI

SEQ ID NO: 2626 - protein, 14 aa, Artificial Sequence
  Non-cyclic GFR-binding peptide
  MOD_RES (1)..(1): Xaa is C or S
XVPTKLSPISILYK

SEQ ID NO: 2627 - protein, 19 aa, Artificial Sequence
  Non-cyclic GFR-binding peptide
  MOD_RES (5)..(6): Xaa is C or S
VGKAXXVPTKLEPISVLYL

SEQ ID NO: 2628 - protein, 16 aa, Artificial Sequence
  Non-cyclic GFR-binding peptide
  MOD_RES (2)..(3): Xaa is C or S
PXXVPQDLEPISILYL

SEQ ID NO: 2629 - protein, 17 aa, Artificial Sequence
  Non-cyclic GFR-binding peptide
  MOD_RES (3)..(4): Xaa is C or S
SPXXVSQDLEPISILYL

SEQ ID NO: 2630 - protein, 16 aa, Artificial Sequence
  Non-cyclic GFR-binding peptide
  MOD_RES (2)..(3): Xaa is C or S
SXXVPARLNAISILYF

SEQ ID NO: 2631 - protein, 9 aa, Artificial Sequence
  Non-cyclic GFR-binding peptide
LEPISVLYL

SEQ ID NO: 2632 - protein, 19 aa, Artificial Sequence
  Non-cyclic GFR-binding peptide
  MOD_RES (5)..(6): Xaa is C or S
APASXXVPARLNAISILYF

SEQ ID NO: 2633 - protein, 20 aa, Artificial Sequence
  Non-cyclic GFR-binding peptide
  MOD_RES (6)..(7): Xaa is C or S
ASASPXXVSQDLEPISILYL

SEQ ID NO: 2634 - protein, 12 aa, Artificial Sequence
  Non-cyclic GFR-binding peptide
PTQLSPISVLYI

SEQ ID NO: 2635 - protein, 17 aa, Artificial Sequence
  Non-cyclic GFR-binding peptide
  MOD_RES (4)..(4): Xaa is C or S
KPTXAPTKLEPISVLYL

SEQ ID NO: 2636 - protein, 10 aa, Artificial Sequence
  Non-cyclic GFR-binding peptide
KLSPISVLYI

SEQ ID NO: 2637 - protein, 11 aa, Artificial Sequence
  Non-cyclic GFR-binding peptide
QALEPISILYL

SEQ ID NO: 2638 - protein, 16 aa, Artificial Sequence
  Non-cyclic GFR-binding peptide
  MOD_RES (2)..(3): Xaa is C or S
SXXVPARLSPISILYK

SEQ ID NO: 2639 - protein, 17 aa, Artificial Sequence
  Non-cyclic GFR-binding peptide
  MOD_RES (3)..(4): Xaa is C or S
KAXXAPTKLEPISVLYL

SEQ ID NO: 2640 - protein, 10 aa, Artificial Sequence
  Non-cyclic GFR-binding peptide
RLEPISILYL

SEQ ID NO: 2641 - protein, 13 aa, Artificial Sequence
  Non-cyclic GFR-binding peptide
VPARLNAISILYF

SEQ ID NO: 2642 - protein, 20 aa, Artificial Sequence
  Non-cyclic GFR-binding peptide
  MOD_RES (6)..(7): Xaa is C or S
SIPKAXXVPTELEPISMLYL

SEQ ID NO: 2643 - protein, 20 aa, Artificial Sequence
  Non-cyclic GFR-binding peptide
  MOD_RES (6)..(7): Xaa is C or S
AAPASXXVPARLEPISILYL

SEQ ID NO: 2644 - protein, 20 aa, Artificial Sequence
  Non-cyclic GFR-binding peptide
  MOD_RES (7)..(7): Xaa is C or S
HVTKPTXAPTKLEPISVLYL

SEQ ID NO: 2645 - protein, 15 aa, Artificial Sequence
  Non-cyclic GFR-binding peptide
  MOD_RES (1)..(2): Xaa is C or S
XXVPARLSPISILYK

SEQ ID NO: 2646 - protein, 15 aa, Artificial Sequence
  Non-cyclic GFR-binding peptide
  MOD_RES (1)..(2): Xaa is C or S
XXVPTELEPISMLYL

SEQ ID NO: 2647 - protein, 15 aa, Artificial Sequence
  Non-cyclic GFR-binding peptide
  MOD_RES (2)..(2): Xaa is C or S
TXAPTKLEPISVLYL

SEQ ID NO: 2648 - protein, 15 aa, Artificial Sequence
  Non-cyclic GFR-binding peptide
  MOD_RES (1)..(2): Xaa is C or S
XXVPQDLEPISILYL

SEQ ID NO: 2649 - protein, 14 aa, Artificial Sequence
  Non-cyclic GFR-binding peptide
  MOD_RES (1)..(1): Xaa is C or S
XAPTQLEPISVLYL

SEQ ID NO: 2650 - protein, 11 aa, Artificial Sequence
  Non-cyclic GFR-binding peptide
QDLSPISILYI

SEQ ID NO: 2651 - protein, 18 aa, Artificial Sequence
  Non-cyclic GFR-binding peptide
  MOD_RES (4)..(5): Xaa is C or S
PASXXVPARLNAISILYF

SEQ ID NO: 2652 - protein, 19 aa, Artificial Sequence
  Non-cyclic GFR-binding peptide
  MOD_RES (5)..(6): Xaa is C or S
SAAPXXVPQALEPISILYL

SEQ ID NO: 2653 - protein, 11 aa, Artificial Sequence
  Non-cyclic GFR-binding peptide
TQLEPISVLYL

SEQ ID NO: 2654 - protein, 13 aa, Artificial Sequence
  Non-cyclic GFR-binding peptide
VPTKLEPISVLYL

SEQ ID NO: 2655 - protein, 11 aa, Artificial Sequence
  Non-cyclic GFR-binding peptide
TELSPISMLYI

SEQ ID NO: 2656 - protein, 13 aa, Artificial Sequence
  Non-cyclic GFR-binding peptide
VPARLSPISILYK

SEQ ID NO: 2657 - protein, 11 aa, Artificial Sequence
  Non-cyclic GFR-binding peptide
TKLSPISVLYI

SEQ ID NO: 2658 - protein, 16 aa, Artificial Sequence
  Non-cyclic GFR-binding peptide
  MOD_RES (2)..(3): Xaa is C or S
PXXAPTKLEPISVLYL

SEQ ID NO: 2659 - protein, 17 aa, Artificial Sequence
  Non-cyclic GFR-binding peptide
  MOD_RES (3)..(4): Xaa is C or S
KAXXVPTELSPISMLYI

SEQ ID NO: 2660 - protein, 15 aa, Artificial Sequence
  Non-cyclic GFR-binding peptide
  MOD_RES (1)..(2): Xaa is C or S
XXVPTKLEPISVLYL

SEQ ID NO: 2661 - protein, 17 aa, Artificial Sequence
  Non-cyclic GFR-binding peptide
  MOD_RES (3)..(4): Xaa is C or S
APXXVPQALSPISILYI

SEQ ID NO: 2662 - protein, 15 aa, Artificial Sequence
  Non-cyclic GFR-binding peptide
  MOD_RES (1)..(2): Xaa is C or S
XXVPARLNAISILYF

SEQ ID NO: 2663 - protein, 9 aa, Artificial Sequence
  Non-cyclic GFR-binding peptide
LEPISMLYL

SEQ ID NO: 2664 - protein, 18 aa, Artificial Sequence
  Non-cyclic GFR-binding peptide
  MOD_RES (4)..(5): Xaa is C or S
GKAXXVPTKLSPISVLYI

SEQ ID NO: 2665 - protein, 19 aa, Artificial Sequence
  Non-cyclic GFR-binding peptide
  MOD_RES (5)..(6): Xaa is C or S
SASPXXVPQDLEPISILYL

SEQ ID NO: 2666 - protein, 20 aa, Artificial Sequence
  Non-cyclic GFR-binding peptide
  MOD_RES (6)..(7): Xaa is C or S
KVGKAXXVPTKLEPISVLYL

SEQ ID NO: 2667 - protein, 20 aa, Artificial Sequence
  Non-cyclic GFR-binding peptide
  MOD_RES (6)..(7): Xaa is C or S
TVPKPXXAPTQLSPISVLYI

SEQ ID NO: 2668 - protein, 17 aa, Artificial Sequence
  Non-cyclic GFR-binding peptide
  MOD_RES (3)..(4): Xaa is C or S
APXXVPQALEPISILYL

SEQ ID NO: 2669 - protein, 18 aa, Artificial Sequence
  Non-cyclic GFR-binding peptide
  MOD_RES (4)..(5): Xaa is C or S
ASPXXVPQDLSPISILYI

SEQ ID NO: 2670 - protein, 14 aa, Artificial Sequence
  Non-cyclic GFR-binding peptide
  MOD_RES (1)..(1): Xaa is C or S
XVPTKLSPISVLYI

SEQ ID NO: 2671 - protein, 17 aa, Artificial Sequence
  Non-cyclic GFR-binding peptide
  MOD_RES (3)..(4): Xaa is C or S
SPXXVPQDLSPISILYI

SEQ ID NO: 2672 - protein, 16 aa, Artificial Sequence
  Non-cyclic GFR-binding peptide
  MOD_RES (2)..(3): Xaa is C or S
PXXVPQALSPISILYI

SEQ ID NO: 2673 - protein, 20 aa, Artificial Sequence
  Non-cyclic GFR-binding peptide
  MOD_RES (6)..(7): Xaa is C or S
AVPKAXXAPTKLSPISVLYI

SEQ ID NO: 2674 - protein, 16 aa, Artificial Sequence
  Non-cyclic GFR-binding peptide
  MOD_RES (2)..(3): Xaa is C or S
PXXAPTQLEPISVLYL

SEQ ID NO: 2675 - protein, 20 aa, Artificial Sequence
  Non-cyclic GFR-binding peptide
  MOD_RES (6)..(7): Xaa is C or S
TVPKPXXAPTQLEPISVLYL

SEQ ID NO: 2676 - protein, 19 aa, Artificial Sequence
  Non-cyclic GFR-binding peptide
  MOD_RES (5)..(6): Xaa is C or S
VPKPXXAPTQLEPISVLYL

SEQ ID NO: 2677 - protein, 19 aa, Artificial Sequence
  Non-cyclic GFR-binding peptide
  MOD_RES (5)..(6): Xaa is C or S
SASPXXVSQDLSPISILYI

SEQ ID NO: 2678 - protein, 17 aa, Artificial Sequence
  Non-cyclic GFR-binding peptide
  MOD_RES (3)..(4): Xaa is C or S
KPXXAPTKLEPISVLYL

SEQ ID NO: 2679 - protein, 11 aa, Artificial Sequence
  Non-cyclic GFR-binding peptide
TKLEPISVLYL

SEQ ID NO: 2680 - protein, 18 aa, Artificial Sequence
  Non-cyclic GFR-binding peptide
  MOD_RES (4)..(5): Xaa is C or S
ASPXXVPQDLEPISILYL

SEQ ID NO: 2681 - protein, 20 aa, Artificial Sequence
  Non-cyclic GFR-binding peptide
  MOD_RES (6)..(7): Xaa is C or S
ASAAPXXVPQALEPISILYL

SEQ ID NO: 2682 - protein, 13 aa, Artificial Sequence
  Non-cyclic GFR-binding peptide
VPTKLNAISILYF

SEQ ID NO: 2683 - protein, 20 aa, Artificial Sequence
  Non-cyclic GFR-binding peptide
  MOD_RES (6)..(7): Xaa is C or S
KVGKAXXVPTKLSPISVLYI

SEQ ID NO: 2684 - protein, 15 aa, Artificial Sequence
  Non-cyclic GFR-binding peptide
  MOD_RES (1)..(2): Xaa is C or S
XXVPTKLNAISILYF

SEQ ID NO: 2685 - protein, 17 aa, Artificial Sequence
  Non-cyclic GFR-binding peptide
  MOD_RES (3)..(4): Xaa is C or S
KAXXVPTELEPISMLYL

SEQ ID NO: 2686 - protein, 12 aa, Artificial Sequence
  Non-cyclic GFR-binding peptide
PARLSPISILYK

SEQ ID NO: 2687 - protein, 15 aa, Artificial Sequence
  Non-cyclic GFR-binding peptide
  MOD_RES (2)..(2): Xaa is C or S
TXAPTKLSPISVLYI

SEQ ID NO: 2688 - protein, 12 aa, Artificial Sequence
  Non-cyclic GFR-binding peptide
PTELSPISMLYI

SEQ ID NO: 2689 - protein, 9 aa, Artificial Sequence
  Non-cyclic GFR-binding peptide
LSPISMLYI

SEQ ID NO: 2690 - protein, 13 aa, Artificial Sequence
  Non-cyclic GFR-binding peptide
APTKLEPISVLYL

SEQ ID NO: 2691 - protein, 10 aa, Artificial Sequence
  Non-cyclic GFR-binding peptide
KLSPISILYK

SEQ ID NO: 2692 - protein, 10 aa, Artificial Sequence
  Non-cyclic GFR-binding peptide
KLSPISILYI

SEQ ID NO: 2693 - protein, 11 aa, Artificial Sequence
  Non-cyclic GFR-binding peptide
ARLEPISILYL

SEQ ID NO: 2694 - protein, 15 aa, Artificial Sequence
  Non-cyclic GFR-binding peptide
  MOD_RES (1)..(2): Xaa is C or S
XXVPTELSPISMLYI

SEQ ID NO: 2695 - protein, 20 aa, Artificial Sequence
  Non-cyclic GFR-binding peptide
  MOD_RES (6)..(7): Xaa is C or S
ASASPXXVPQDLSPISILYI

SEQ ID NO: 2696 - protein, 17 aa, Artificial Sequence
  Non-cyclic GFR-binding peptide
  MOD_RES (3)..(4): Xaa is C or S
KAXXVPTKLEPISVLYL

SEQ ID NO: 2697 - protein, 14 aa, Artificial Sequence
  Non-cyclic GFR-binding peptide
  MOD_RES (1)..(1): Xaa is C or S
XVPQALEPISILYL

SEQ ID NO: 2698 - protein, 14 aa, Artificial Sequence
  Non-cyclic GFR-binding peptide
  MOD_RES (1)..(1): Xaa is C or S
XVPTELSPISMLYI

SEQ ID NO: 2699 - protein, 16 aa, Artificial Sequence
  Non-cyclic GFR-binding peptide
  MOD_RES (2)..(3): Xaa is C or S
PXXVSQDLSPISILYI

SEQ ID NO: 2700 - protein, 14 aa, Artificial Sequence
  Non-cyclic GFR-binding peptide
  MOD_RES (1)..(1): Xaa is C or S
XAPTKLEPISVLYL

SEQ ID NO: 2701 - protein, 18 aa, Artificial Sequence
  Non-cyclic GFR-binding peptide
  MOD_RES (5)..(5): Xaa is C or S
TKPTXAPTKLEPISVLYL

SEQ ID NO: 2702 - protein, 18 aa, Artificial Sequence
  Non-cyclic GFR-binding peptide
  MOD_RES (4)..(5): Xaa is C or S
SKAXXVPTKLSPISILYK

SEQ ID NO: 2703 - protein, 18 aa, Artificial Sequence
  Non-cyclic GFR-binding peptide
  MOD_RES (4)..(5): Xaa is C or S
SKAXXVPTKLSPISILYI

SEQ ID NO: 2704 - protein, 17 aa, Artificial Sequence
  Non-cyclic GFR-binding peptide
  MOD_RES (3)..(4): Xaa is C or S
KPXXAPTQLEPISVLYL

SEQ ID NO: 2705 - protein, 12 aa, Artificial Sequence
  Non-cyclic GFR-binding peptide
PQDLEPISILYL

SEQ ID NO: 2706 - protein, 14 aa, Artificial Sequence
  Non-cyclic GFR-binding peptide
  MOD_RES (1)..(1): Xaa is C or S
XVPARLSPISILYK

SEQ ID NO: 2707 - protein, 12 aa, Artificial Sequence
  Non-cyclic GFR-binding peptide
PTKLSPISVLYI

SEQ ID NO: 2708 - protein, 20 aa, Artificial Sequence
  Non-cyclic GFR-binding peptide
  MOD_RES (6)..(7): Xaa is C or S
KIPKAXXVPTELEPISMLYL

SEQ ID NO: 2709 - protein, 16 aa, Artificial Sequence
  Non-cyclic GFR-binding peptide
  MOD_RES (2)..(3): Xaa is C or S
AXXVPTKLEPISVLYL

SEQ ID NO: 2710 - protein, 16 aa, Artificial Sequence
  Non-cyclic GFR-binding peptide
  MOD_RES (2)..(3): Xaa is C or S
AXXVPTELEPISMLYL

SEQ ID NO: 2711 - protein, 17 aa, Artificial Sequence
  Non-cyclic GFR-binding peptide
  MOD_RES (3)..(4): Xaa is C or S
KAXXVPTKLNAISILYF

SEQ ID NO: 2712 - protein, 18 aa, Artificial Sequence
  Non-cyclic GFR-binding peptide
  MOD_RES (4)..(5): Xaa is C or S
PKPXXAPTQLEPISVLYL

SEQ ID NO: 2713 - protein, 20 aa, Artificial Sequence
  Non-cyclic GFR-binding peptide
  MOD_RES (6)..(7): Xaa is C or S
AAPASXXVPARLSPISILYK

SEQ ID NO: 2714 - protein, 14 aa, Artificial Sequence
  Non-cyclic GFR-binding peptide
  MOD_RES (1)..(1): Xaa is C or S
XVPQDLEPISILYL

SEQ ID NO: 2715 - protein, 13 aa, Artificial Sequence
  Non-cyclic GFR-binding peptide
APTQLEPISVLYL

SEQ ID NO: 2716 - protein, 16 aa, Artificial Sequence
  Non-cyclic GFR-binding peptide
  MOD_RES (2)..(3): Xaa is C or S
SXXVPARLEPISILYL

SEQ ID NO: 2717 - protein, 15 aa, Artificial Sequence
  Non-cyclic GFR-binding peptide
  MOD_RES (1)..(2): Xaa is C or S
XXAPTQLEPISVLYL

SEQ ID NO: 2718 - protein, 19 aa, Artificial Sequence
  Non-cyclic GFR-binding peptide
  MOD_RES (5)..(6): Xaa is C or S
VPKAXXAPTKLEPISVLYL

SEQ ID NO: 2719 - protein, 11 aa, Artificial Sequence
  Non-cyclic GFR-binding peptide
TKLNAISILYF

SEQ ID NO: 2720 - protein, 19 aa, Artificial Sequence
  Non-cyclic GFR-binding peptide
  MOD_RES (6)..(6): Xaa is C or S
VTKPTXAPTKLEPISVLYL

SEQ ID NO: 2721 - protein, 12 aa, Artificial Sequence
  Non-cyclic GFR-binding peptide
PTKLSPISILYI

SEQ ID NO: 2722 - protein, 17 aa, Artificial Sequence
  Non-cyclic GFR-binding peptide
  MOD_RES (3)..(4): Xaa is C or S
SPXXVSQDLSPISILYI

SEQ ID NO: 2723 - protein, 20 aa, Artificial Sequence
  Non-cyclic GFR-binding peptide
  MOD_RES (6)..(7): Xaa is C or S
KASKAXXVPTKLSPISILYK

SEQ ID NO: 2724 - protein, 20 aa, Artificial Sequence
  Non-cyclic GFR-binding peptide
  MOD_RES (6)..(7): Xaa is C or S
KASKAXXVPTKLSPISILYI

SEQ ID NO: 2725 - protein, 13 aa, Artificial Sequence
  Non-cyclic GFR-binding peptide
VPARLEPISILYL

SEQ ID NO: 2726 - protein, 15 aa, Artificial Sequence
  Non-cyclic GFR-binding peptide
  MOD_RES (1)..(2): Xaa is C or S
XXAPTKLSPISVLYI

SEQ ID NO: 2727 - protein, 20 aa, Artificial Sequence
  Non-cyclic GFR-binding peptide
  MOD_RES (6)..(7): Xaa is C or S
AAPASXXVPARLNAISILYF

SEQ ID NO: 2728 - protein, 19 aa, Artificial Sequence
  Non-cyclic GFR-binding peptide
  MOD_RES (5)..(6): Xaa is C or S
APASXXVPARLEPISILYL

SEQ ID NO: 2729 - protein, 16 aa, Artificial Sequence
  Non-cyclic GFR-binding peptide
  MOD_RES (2)..(3): Xaa is C or S
PXXAPTKLSPISVLYI

SEQ ID NO: 2730 - protein, 19 aa, Artificial Sequence
  Non-cyclic GFR-binding peptide
  MOD_RES (5)..(6): Xaa is C or S
SAAPXXVPQALSPISILYI

SEQ ID NO: 2731 - protein, 18 aa, Artificial Sequence
  Non-cyclic GFR-binding peptide
  MOD_RES (4)..(5): Xaa is C or S
PKAXXVPTELEPISMLYL

SEQ ID NO: 2732 - protein, 18 aa, Artificial Sequence
  Non-cyclic GFR-binding peptide
  MOD_RES (4)..(5): Xaa is C or S
ASPXXVSQDLEPISILYL

SEQ ID NO: 2733 - protein, 19 aa, Artificial Sequence
  Non-cyclic GFR-binding peptide
  MOD_RES (5)..(6): Xaa is C or S
IPKAXXVPTELSPISMLYI

SEQ ID NO: 2734 - protein, 13 aa, Artificial Sequence
  Non-cyclic GFR-binding peptide
VPQDLSPISILYI

SEQ ID NO: 2735 - protein, 10 aa, Artificial Sequence
  Non-cyclic GFR-binding peptide
ELEPISMLYL

SEQ ID NO: 2736 - protein, 17 aa, Artificial Sequence
  Non-cyclic GFR-binding peptide
  MOD_RES (3)..(4): Xaa is C or S
ASXXVPARLSPISILYK

SEQ ID NO: 2737 - protein, 14 aa, Artificial Sequence
  Non-cyclic GFR-binding peptide
  MOD_RES (1)..(1): Xaa is C or S
XAPTQLSPISVLYI

SEQ ID NO: 2738 - protein, 12 aa, Artificial Sequence
  Non-cyclic GFR-binding peptide
PQALEPISILYL

SEQ ID NO: 2739 - protein, 12 aa, Artificial Sequence
  Non-cyclic GFR-binding peptide
PTKLSPISILYK

SEQ ID NO: 2740 - protein, 16 aa, Artificial Sequence
  Non-cyclic GFR-binding peptide
  MOD_RES (2)..(3): Xaa is C or S
AXXVPTELSPISMLYI

SEQ ID NO: 2741 - protein, 15 aa, Artificial Sequence
  Non-cyclic GFR-binding peptide
  MOD_RES (1)..(2): Xaa is C or S
XXVPTKLSPISVLYI

SEQ ID NO: 2742 - protein, 11 aa, Artificial Sequence
  Non-cyclic GFR-binding peptide
ARLSPISILYK

SEQ ID NO: 2743 - protein, 14 aa, Artificial Sequence
  Non-cyclic GFR-binding peptide
  MOD_RES (1)..(1): Xaa is C or S
XVSQDLSPISILYI

SEQ ID NO: 2744 - protein, 13 aa, Artificial Sequence
  Non-cyclic GFR-binding peptide
VPTELSPISMLYI

SEQ ID NO: 2745 - protein, 18 aa, Artificial Sequence
  Non-cyclic GFR-binding peptide
  MOD_RES (4)..(5): Xaa is C or S
PKPXXAPTKLEPISVLYL

SEQ ID NO: 2746 - protein, 20 aa, Artificial Sequence
  Non-cyclic GFR-binding peptide
  MOD_RES (6)..(7): Xaa is C or S
SIPKAXXVPTELSPISMLYI

SEQ ID NO: 2747 - protein, 13 aa, Artificial Sequence
  Non-cyclic GFR-binding peptide
VPTKLSPISVLYI

SEQ ID NO: 2748 - protein, 19 aa, Artificial Sequence
  Non-cyclic GFR-binding peptide
  MOD_RES (5)..(6): Xaa is C or S
VPKAXXAPTKLSPISVLYI

SEQ ID NO: 2749 - protein, 18 aa, Artificial Sequence
  Non-cyclic GFR-binding peptide
  MOD_RES (4)..(5): Xaa is C or S
GKAXXVPTKLEPISVLYL

SEQ ID NO: 2750 - protein, 11 aa, Artificial Sequence
  Non-cyclic GFR-binding peptide
ARLNAISILYF

SEQ ID NO: 2751 - protein, 19 aa, Artificial Sequence
  Non-cyclic GFR-binding peptide
  MOD_RES (5)..(6): Xaa is C or S
SASPXXVPQDLSPISILYI

SEQ ID NO: 2752 - protein, 16 aa, Artificial Sequence
  Non-cyclic GFR-binding peptide
  MOD_RES (2)..(3): Xaa is C or S
AXXVPTKLSPISILYI

SEQ ID NO: 2753 - protein, 20 aa, Artificial Sequence
  Non-cyclic GFR-binding peptide
  MOD_RES (6)..(7): Xaa is C or S
KASKAXXVPTKLNAISILYF

SEQ ID NO: 2754 - protein, 16 aa, Artificial Sequence
  Non-cyclic GFR-binding peptide
  MOD_RES (2)..(3): Xaa is C or S
AXXVPTKLSPISILYK

SEQ ID NO: 2755 - protein, 20 aa, Artificial Sequence
  Non-cyclic GFR-binding peptide
  MOD_RES (6)..(7): Xaa is C or S
YVPKPXXAPTKLSPISVLYI

SEQ ID NO: 2756 - protein, 13 aa, Artificial Sequence
  Non-cyclic GFR-binding peptide
VPQALEPISILYL

SEQ ID NO: 2757 - protein, 16 aa, Artificial Sequence
  Non-cyclic GFR-binding peptide
  MOD_RES (2)..(3): Xaa is C or S
AXXVPTKLNAISILYF

SEQ ID NO: 2758 - protein, 11 aa, Artificial Sequence
  Non-cyclic GFR-binding peptide
TELEPISMLYL

SEQ ID NO: 2759 - protein, 15 aa, Artificial Sequence
  Non-cyclic GFR-binding peptide
  MOD_RES (1)..(2): Xaa is C or S
XXVPARLEPISILYL

SEQ ID NO: 2760 - protein, 12 aa, Artificial Sequence
  Non-cyclic GFR-binding peptide
PARLEPISILYL

SEQ ID NO: 2761 - protein, 18 aa, Artificial Sequence
  Non-cyclic GFR-binding peptide
  MOD_RES (4)..(5): Xaa is C or S
PKAXXAPTKLEPISVLYL

SEQ ID NO: 2762 - protein, 11 aa, Artificial Sequence
  Non-cyclic GFR-binding peptide
TQLSPISVLYI

SEQ ID NO: 2763 - protein, 19 aa, Artificial Sequence
  Non-cyclic GFR-binding peptide
  MOD_RES (5)..(6): Xaa is C or S
ASKAXXVPTKLSPISILYK

SEQ ID NO: 2764 - protein, 19 aa, Artificial Sequence
  Non-cyclic GFR-binding peptide
  MOD_RES (5)..(6): Xaa is C or S
ASKAXXVPTKLSPISILYI

SEQ ID NO: 2765 - protein, 17 aa, Artificial Sequence
  Non-cyclic GFR-binding peptide
  MOD_RES (3)..(4): Xaa is C or S
ASXXVPARLNAISILYF

SEQ ID NO: 2766 - protein, 19 aa, Artificial Sequence
  Non-cyclic GFR-binding peptide
  MOD_RES (5)..(6): Xaa is C or S
VPKPXXAPTQLSPISVLYI

SEQ ID NO: 2767 - protein, 11 aa, Artificial Sequence
  Non-cyclic GFR-binding peptide
QDLEPISILYL

SEQ ID NO: 2768 - protein, 19 aa, Artificial Sequence
  Non-cyclic GFR-binding peptide
  MOD_RES (5)..(6): Xaa is C or S
ASKAXXVPTKLNAISILYF

SEQ ID NO: 2769 - protein, 12 aa, Artificial Sequence
  Non-cyclic GFR-binding peptide
SQDLEPISILYL

SEQ ID NO: 2770 - protein, 16 aa, Artificial Sequence
  Non-cyclic GFR-binding peptide
  MOD_RES (2)..(3): Xaa is C or S
AXXAPTKLSPISVLYI

SEQ ID NO: 2771 - protein, 9 aa, Artificial Sequence
  Non-cyclic GFR-binding peptide
LSPISVLYI

SEQ ID NO: 2772 - protein, 12 aa, Artificial Sequence
  Non-cyclic GFR-binding peptide
PTKLNAISILYF

SEQ ID NO: 2773 - protein, 16 aa, Artificial Sequence
  Non-cyclic GFR-binding peptide
  MOD_RES (3)..(3): Xaa is C or S
PTXAPTKLSPISVLYI

SEQ ID NO: 2774 - protein, 17 aa, Artificial Sequence
  Non-cyclic GFR-binding peptide
  MOD_RES (3)..(4): Xaa is C or S
KAXXVPTKLSPISVLYI

SEQ ID NO: 2775 - protein, 19 aa, Artificial Sequence
  Non-cyclic GFR-binding peptide
  MOD_RES (5)..(6): Xaa is C or S
VPKPXXAPTKLSPISVLYI

SEQ ID NO: 2776 - protein, 10 aa, Artificial Sequence
  Non-cyclic GFR-binding peptide
ALEPISILYL

SEQ ID NO: 2777 - protein, 16 aa, Artificial Sequence
  Non-cyclic GFR-binding peptide
  MOD_RES (2)..(3): Xaa is C or S
PXXVPQDLSPISILYI

SEQ ID NO: 2778 - protein, 10 aa, Artificial Sequence
  Non-cyclic GFR-binding peptide
QLSPISVLYI

SEQ ID NO: 2779 - protein, 15 aa, Artificial Sequence
  Non-cyclic GFR-binding peptide
  MOD_RES (1)..(2): Xaa is C or S
XXVPQALEPISILYL

SEQ ID NO: 2780 - protein, 13 aa, Artificial Sequence
  Non-cyclic GFR-binding peptide
VSQDLSPISILYI

SEQ ID NO: 2781 - protein, 15 aa, Artificial Sequence
  Non-cyclic GFR-binding peptide
  MOD_RES (1)..(2): Xaa is C or S
XXVSQDLSPISILYI

SEQ ID NO: 2782 - protein, 18 aa, Artificial Sequence
  Non-cyclic GFR-binding peptide
  MOD_RES (4)..(5): Xaa is C or S
PASXXVPARLSPISILYK

SEQ ID NO: 2783 - protein, 20 aa, Artificial Sequence
  Non-cyclic GFR-binding peptide
  MOD_RES (6)..(7): Xaa is C or S
ASASPXXVSQDLSPISILYI

SEQ ID NO: 2784 - protein, 11 aa, Artificial Sequence
  Non-cyclic GFR-binding peptide
QALSPISILYI

SEQ ID NO: 2785 - protein, 17 aa, Artificial Sequence
  Non-cyclic GFR-binding peptide
  MOD_RES (4)..(4): Xaa is C or S
KPTXAPTKLSPISVLYI

SEQ ID NO: 2786 - protein, 20 aa, Artificial Sequence
  Non-cyclic GFR-binding peptide
  MOD_RES (6)..(7): Xaa is C or S
AVPKAXXAPTKLEPISVLYL

SEQ ID NO: 2787 - protein, 16 aa, Artificial Sequence
  Non-cyclic GFR-binding peptide
  MOD_RES (2)..(3): Xaa is C or S
PXXAPTQLSPISVLYI

SEQ ID NO: 2788 - protein, 15 aa, Artificial Sequence
  Non-cyclic GFR-binding peptide
  MOD_RES (1)..(2): Xaa is C or S
XXVPQALSPISILYI

SEQ ID NO: 2789 - protein, 18 aa, Artificial Sequence
  Non-cyclic GFR-binding peptide
  MOD_RES (4)..(5): Xaa is C or S
AAPXXVPQALEPISILYL

SEQ ID NO: 2790 - protein, 12 aa, Artificial Sequence
  Non-cyclic GFR-binding peptide
PTKLEPISVLYL

SEQ ID NO: 2791 - protein, 15 aa, Artificial Sequence
  Non-cyclic GFR-binding peptide
  MOD_RES (1)..(2): Xaa is C or S
XXVPTKLSPISILYI

SEQ ID NO: 2792 - protein, 15 aa, Artificial Sequence
  Non-cyclic GFR-binding peptide
  MOD_RES (1)..(2): Xaa is C or S
XXVPTKLSPISILYK

SEQ ID NO: 2793 - protein, 17 aa, Artificial Sequence
  Non-cyclic GFR-binding peptide
  MOD_RES (3)..(4): Xaa is C or S
SPXXVPQDLEPISILYL

SEQ ID NO: 2794 - protein, 14 aa, Artificial Sequence
  Non-cyclic GFR-binding peptide
  MOD_RES (1)..(1): Xaa is C or S
XVPARLEPISILYL

SEQ ID NO: 2795 - protein, 18 aa, Artificial Sequence
  Non-cyclic GFR-binding peptide
  MOD_RES (4)..(5): Xaa is C or S
AAPXXVPQALSPISILYI

SEQ ID NO: 2796 - protein, 14 aa, Artificial Sequence
  Non-cyclic GFR-binding peptide
  MOD_RES (1)..(1): Xaa is C or S
XVPTELEPISMLYL

SEQ ID NO: 2797 - protein, 16 aa, Artificial Sequence
  Non-cyclic GFR-binding peptide
  MOD_RES (2)..(3): Xaa is C or S
PXXVSQDLEPISILYL

SEQ ID NO: 2798 - protein, 14 aa, Artificial Sequence
  Non-cyclic GFR-binding peptide
  MOD_RES (1)..(1): Xaa is C or S
XAPTKLSPISVLYI

SEQ ID NO: 2799 - protein, 16 aa, Artificial Sequence
  Non-cyclic GFR-binding peptide
  MOD_RES (2)..(3): Xaa is C or S
PXXVPQALEPISILYL

SEQ ID NO: 2800 - protein, 18 aa, Artificial Sequence
  Non-cyclic GFR-binding peptide
  MOD_RES (4)..(5): Xaa is C or S
PKPXXAPTQLSPISVLYI

SEQ ID NO: 2801 - protein, 20 aa, Artificial Sequence
  Non-cyclic GFR-binding peptide
  MOD_RES (6)..(7): Xaa is C or S
ASASPXXVPQDLEPISILYL

SEQ ID NO: 2802 - protein, 10 aa, Artificial Sequence
  Non-cyclic GFR-binding peptide
KLNAISILYF

SEQ ID NO: 2803 - protein, 13 aa, Artificial Sequence
  Non-cyclic GFR-binding peptide
APTQLSPISVLYI

SEQ ID NO: 2804 - protein, 13 aa, Artificial Sequence
  Non-cyclic GFR-binding peptide
VPTKLSPISILYI

SEQ ID NO: 2805 - protein, 10 aa, Artificial Sequence
  Non-cyclic GFR-binding peptide
ALSPISILYI

SEQ ID NO: 2806 - protein, 14 aa, Artificial Sequence
  Non-cyclic GFR-binding peptide
  MOD_RES (1)..(1): Xaa is C or S
XVPTKLEPISVLYL

SEQ ID NO: 2807 - protein, 13 aa, Artificial Sequence
  Non-cyclic GFR-binding peptide
VPTKLSPISILYK

SEQ ID NO: 2808 - protein, 16 aa, Artificial Sequence
  Non-cyclic GFR-binding peptide
  MOD_RES (2)..(3): Xaa is C or S
AXXAPTKLEPISVLYL

SEQ ID NO: 2809 - protein, 10 aa, Artificial Sequence
  Non-cyclic GFR-binding peptide
RLSPISILYK

SEQ ID NO: 2810 - protein, 17 aa, Artificial Sequence
  Non-cyclic GFR-binding peptide
  MOD_RES (3)..(4): Xaa is C or S
KAXXAPTKLSPISVLYI

SEQ ID NO: 2811 - protein, 13 aa, Artificial Sequence
  Non-cyclic GFR-binding peptide
VPQALSPISILYI

SEQ ID NO: 2812 - protein, 15 aa, Artificial Sequence
  Non-cyclic GFR-binding peptide
  MOD_RES (1)..(2): Xaa is C or S
XXAPTQLSPISVLYI

SEQ ID NO: 2813 - protein, 12 aa, Artificial Sequence
  Non-cyclic GFR-binding peptide
PQDLSPISILYI

SEQ ID NO: 2814 - protein, 15 aa, Artificial Sequence
  Non-cyclic GFR-binding peptide
  MOD_RES (1)..(2): Xaa is C or S
XXVSQDLEPISILYL

SEQ ID NO: 2815 - protein, 14 aa, Artificial Sequence
  Non-cyclic GFR-binding peptide
  MOD_RES (1)..(1): Xaa is C or S
XVPQDLSPISILYI

SEQ ID NO: 2816 - protein, 13 aa, Artificial Sequence
  Non-cyclic GFR-binding peptide
VSQDLEPISILYL

SEQ ID NO: 2817 - protein, 18 aa, Artificial Sequence
  Non-cyclic GFR-binding peptide
  MOD_RES (4)..(5): Xaa is C or S
PASXXVPARLEPISILYL

SEQ ID NO: 2818 - protein, 19 aa, Artificial Sequence
  Non-cyclic GFR-binding peptide
  MOD_RES (6)..(6): Xaa is C or S
VTKPTXAPTKLSPISVLYI

SEQ ID NO: 2819 - protein, 18 aa, Artificial Sequence
  Non-cyclic GFR-binding peptide
  MOD_RES (5)..(5): Xaa is C or S
TKPTXAPTKLSPISVLYI

SEQ ID NO: 2820 - protein, 18 aa, Artificial Sequence
  Non-cyclic GFR-binding peptide
  MOD_RES (4)..(5): Xaa is C or S
PKAXXAPTKLSPISVLYI

SEQ ID NO: 2821 - protein, 10 aa, Artificial Sequence
  Non-cyclic GFR-binding peptide
QLEPISVLYL

SEQ ID NO: 2822 - protein, 15 aa, Artificial Sequence
  Non-cyclic GFR-binding peptide
  MOD_RES (1)..(2): Xaa is C or S
XXVPQDLSPISILYI

SEQ ID NO: 2823 - protein, 20 aa, Artificial Sequence
  Non-cyclic GFR-binding peptide
  MOD_RES (6)..(7): Xaa is C or S
ASAAPXXVPQALSPISILYI

SEQ ID NO: 2824 - protein, 20 aa, Artificial Sequence
  Non-cyclic GFR-binding peptide
  MOD_RES (6)..(7): Xaa is C or S
KIPKAXXVPTELSPISMLYI

SEQ ID NO: 2825 - protein, 16 aa, Artificial Sequence
  Non-cyclic GFR-binding peptide
  MOD_RES (2)..(3): Xaa is C or S
AXXVPTKLSPISVLYI

SEQ ID NO: 2826 - protein, 18 aa, Artificial Sequence
  Non-cyclic GFR-binding peptide
  MOD_RES (4)..(5): Xaa is C or S
SKAXXVPTKLNAISILYF

SEQ ID NO: 2827 - protein, 12 aa, Artificial Sequence
  Non-cyclic GFR-binding peptide
SQDLSPISILYI

SEQ ID NO: 2828 - protein, 19 aa, Artificial Sequence
  Non-cyclic GFR-binding peptide
  MOD_RES (5)..(6): Xaa is C or S
SASPXXVSQDLEPISILYL

SEQ ID NO: 2829 - protein, 17 aa, Artificial Sequence
  Non-cyclic GFR-binding peptide
  MOD_RES (3)..(4): Xaa is C or S
KPXXAPTKLSPISVLYI

SEQ ID NO: 2830 - protein, 12 aa, Artificial Sequence
  Non-cyclic GFR-binding peptide
PTELEPISMLYL

SEQ ID NO: 2831 - protein, 17 aa, Artificial Sequence
  Non-cyclic GFR-binding peptide
  MOD_RES (3)..(4): Xaa is C or S
KPXXAPTQLSPISVLYI

SEQ ID NO: 2832 - protein, 14 aa, Artificial Sequence
  Non-cyclic GFR-binding peptide
  MOD_RES (1)..(1): Xaa is C or S
XVPARLNAISILYF

SEQ ID NO: 2833 - protein, 14 aa, Artificial Sequence
  Non-cyclic GFR-binding peptide
  MOD_RES (1)..(1): Xaa is C or S
XVPQALSPISILYI

SEQ ID NO: 2834 - protein, 19 aa, Artificial Sequence
  Non-cyclic GFR-binding peptide
  MOD_RES (5)..(6): Xaa is C or S
VGKAXXVPTKLSPISVLYI

SEQ ID NO: 2835 - protein, 18 aa, Artificial Sequence
  Non-cyclic GFR-binding peptide
  MOD_RES (4)..(5): Xaa is C or S
PKPXXAPTKLSPISVLYI

SEQ ID NO: 2836 - protein, 19 aa, Artificial Sequence
  Non-cyclic GFR-binding peptide
  MOD_RES (5)..(6): Xaa is C or S
IPKAXXVPTELEPISMLYL

SEQ ID NO: 2837 - protein, 10 aa, Artificial Sequence
  Non-cyclic GFR-binding peptide
DLSPISILYI

SEQ ID NO: 2838 - protein, 20 aa, Artificial Sequence
  Non-cyclic GFR-binding peptide
  MOD_RES (7)..(7): Xaa is C or S
HVTKPTXAPTKLSPISVLYI

SEQ ID NO: 2839 - protein, 13 aa, Artificial Sequence
  Non-cyclic GFR-binding peptide
APTKLSPISVLYI

SEQ ID NO: 2840 - protein, 20 aa, Artificial Sequence
  Non-cyclic GFR-binding peptide
  MOD_RES (6)..(7): Xaa is C or S
YVPKPXXAPTKLEPISVLYL

SEQ ID NO: 2841 - protein, 11 aa, Artificial Sequence
  Non-cyclic GFR-binding peptide
TKLSPISILYK

SEQ ID NO: 2842 - protein, 17 aa, Artificial Sequence
  Non-cyclic GFR-binding peptide
  MOD_RES (3)..(4): Xaa is C or S
KAXXVPTKLSPISILYK

SEQ ID NO: 2843 - protein, 17 aa, Artificial Sequence
  Non-cyclic GFR-binding peptide
  MOD_RES (3)..(4): Xaa is C or S
KAXXVPTKLSPISILYI

SEQ ID NO: 2844 - protein, 12 aa, Artificial Sequence
  Non-cyclic GFR-binding peptide
PTQLEPISVLYL

SEQ ID NO: 2845 - protein, 11 aa, Artificial Sequence
  Non-cyclic GFR-binding peptide
TKLSPISILYI

SEQ ID NO: 2846 - protein, 10 aa, Artificial Sequence
  Non-cyclic GFR-binding peptide
KLEPISVLYL

SEQ ID NO: 2847 - protein, 16 aa, Artificial Sequence
  Non-cyclic GFR-binding peptide
  MOD_RES (14)..(15): Xaa is C or S
FYLMNIPSLETPVXXA

SEQ ID NO: 2848 - protein, 13 aa, Artificial Sequence
  Non-cyclic GFR-binding peptide
FYLVNIPSLKTPA

SEQ ID NO: 2849 - protein, 14 aa, Artificial Sequence
  Non-cyclic GFR-binding peptide
  MOD_RES (14)..(14): Xaa is C or S
FYLINIPSLKTPVX

SEQ ID NO: 2850 - protein, 16 aa, Artificial Sequence
  Non-cyclic GFR-binding peptide
  MOD_RES (14)..(15): Xaa is C or S
FYLINIPSLRAPVXXS

SEQ ID NO: 2851 - protein, 15 aa, Artificial Sequence
  Non-cyclic GFR-binding peptide
  MOD_RES (14)..(15): Xaa is C or S
FYLMNIPSTKVPAXX

SEQ ID NO: 2852 - protein, 14 aa, Artificial Sequence
  Non-cyclic GFR-binding peptide
  MOD_RES (14)..(14): Xaa is C or S
FYLVNIPSLQTPAX

SEQ ID NO: 2853 - protein, 19 aa, Artificial Sequence
  Non-cyclic GFR-binding peptide
  MOD_RES (14)..(15): Xaa is C or S
FYLMNIPSLETPVXXAKPI

SEQ ID NO: 2854 - protein, 13 aa, Artificial Sequence
  Non-cyclic GFR-binding peptide
FYLINIPSLRTPV

SEQ ID NO: 2855 - protein, 20 aa, Artificial Sequence
  Non-cyclic GFR-binding peptide
  MOD_RES (14)..(15): Xaa is C or S
FYLINIPSLRAPVXXSAPAA

SEQ ID NO: 2856 - protein, 13 aa, Artificial Sequence
  Non-cyclic GFR-binding peptide
FYLVNIPSLKTPV

SEQ ID NO: 2857 - protein, 17 aa, Artificial Sequence
  Non-cyclic GFR-binding peptide
  MOD_RES (14)..(15): Xaa is C or S
FYLVNIPSLKTPAXXAK

SEQ ID NO: 2858 - protein, 10 aa, Artificial Sequence
  Non-cyclic GFR-binding peptide
FYLVNIPSLQ

SEQ ID NO: 2859 - protein, 10 aa, Artificial Sequence
  Non-cyclic GFR-binding peptide
FYLINIPSLR

SEQ ID NO: 2860 - protein, 10 aa, Artificial Sequence
  Non-cyclic GFR-binding peptide
FYLVNIPSLK

SEQ ID NO: 2861 - protein, 15 aa, Artificial Sequence
  Non-cyclic GFR-binding peptide
  MOD_RES (14)..(15): Xaa is C or S
FYLMNIPSLETPVXX

SEQ ID NO: 2862 - protein, 16 aa, Artificial Sequence
  Non-cyclic GFR-binding peptide
  MOD_RES (14)..(15): Xaa is C or S
FYLINIPSLRTPVXXT

SEQ ID NO: 2863 - protein, 14 aa, Artificial Sequence
  Non-cyclic GFR-binding peptide
  MOD_RES (14)..(14): Xaa is C or S
FYLINIPSLRTPVX

SEQ ID NO: 2864 - protein, 17 aa, Artificial Sequence
  Non-cyclic GFR-binding peptide
  MOD_RES (14)..(14): Xaa is C or S
FYLVNIPSLKTPAXTPK

SEQ ID NO: 2865 - protein, 20 aa, Artificial Sequence
  Non-cyclic GFR-binding peptide
  MOD_RES (14)..(15): Xaa is C or S
FYLINIPSLKTPVXXAKSAK

SEQ ID NO: 2866 - protein, 11 aa, Artificial Sequence
  Non-cyclic GFR-binding peptide
FYLMNIPSLET

SEQ ID NO: 2867 - protein, 11 aa, Artificial Sequence
  Non-cyclic GFR-binding peptide
FYLINIPSLRA

SEQ ID NO: 2868 - protein, 19 aa, Artificial Sequence
  Non-cyclic GFR-binding peptide
  MOD_RES (14)..(14): Xaa is C or S
FYLVNIPSLKTPAXTPKTV

SEQ ID NO: 2869 - protein, 13 aa, Artificial Sequence
  Non-cyclic GFR-binding peptide
FYLINIPSLKTPV

SEQ ID NO: 2870 - protein, 20 aa, Artificial Sequence
  Non-cyclic GFR-binding peptide
  MOD_RES (14)..(15): Xaa is C or S
FYLMNIPSLETPVXXAKPIS

SEQ ID NO: 2871 - protein, 17 aa, Artificial Sequence
  Non-cyclic GFR-binding peptide
  MOD_RES (14)..(15): Xaa is C or S
FYLINIPSLRTPVXXTP

SEQ ID NO: 2872 - protein, 13 aa, Artificial Sequence
  Non-cyclic GFR-binding peptide
FYLVNIPSLQTPA

SEQ ID NO: 2873 - protein, 9 aa, Artificial Sequence
  Non-cyclic GFR-binding peptide
FYLMNIPSL

SEQ ID NO: 2874 - protein, 16 aa, Artificial Sequence
  Non-cyclic GFR-binding peptide
  MOD_RES (14)..(15): Xaa is C or S
FYLMNIPSTKVPAXXT

SEQ ID NO: 2875 - protein, 12 aa, Artificial Sequence
  Non-cyclic GFR-binding peptide
FYLINIPSLKTP

SEQ ID NO: 2876 - protein, 20 aa, Artificial Sequence
  Non-cyclic GFR-binding peptide
  MOD_RES (14)..(15): Xaa is C or S
FYLVNIPSLQTPAXXPKPVT

SEQ ID NO: 2877 - protein, 20 aa, Artificial Sequence
  Non-cyclic GFR-binding peptide
  MOD_RES (14)..(15): Xaa is C or S
FYLVNIPSLKTPVXXAKGVK

SEQ ID NO: 2878 - protein, 12 aa, Artificial Sequence
  Non-cyclic GFR-binding peptide
FYLMNIPSLETP

SEQ ID NO: 2879 - protein, 14 aa, Artificial Sequence
  Non-cyclic GFR-binding peptide
  MOD_RES (14)..(14): Xaa is C or S
FYLVNIPSLKTPVX

SEQ ID NO: 2880 - protein, 18 aa, Artificial Sequence
  Non-cyclic GFR-binding peptide
  MOD_RES (14)..(15): Xaa is C or S
FYLMNIPSLETPVXXAKP

SEQ ID NO: 2881 - protein, 16 aa, Artificial Sequence
  Non-cyclic GFR-binding peptide
  MOD_RES (14)..(15): Xaa is C or S
FYLVNIPSLKTPAXXP

SEQ ID NO: 2882 - protein, 18 aa, Artificial Sequence
  Non-cyclic GFR-binding peptide
  MOD_RES (14)..(14): Xaa is C or S
FYLVNIPSLKTPAXTPKT

SEQ ID NO: 2883 - protein, 15 aa, Artificial Sequence
  Non-cyclic GFR-binding peptide
  MOD_RES (14)..(15): Xaa is C or S
FYLINIPSLRAPVXX

SEQ ID NO: 2884 - protein, 19 aa, Artificial Sequence
  Non-cyclic GFR-binding peptide
  MOD_RES (14)..(15): Xaa is C or S
FYLVNIPSLKTPAXXAKPV

SEQ ID NO: 2885 - protein, 20 aa, Artificial Sequence
  Non-cyclic GFR-binding peptide
  MOD_RES (14)..(15): Xaa is C or S
FYLMNIPSLETPVXXAKPIK

SEQ ID NO: 2886 - protein, 13 aa, Artificial Sequence
  Non-cyclic GFR-binding peptide
FYLMNIPSTKVPA

SEQ ID NO: 2887 - protein, 12 aa, Artificial Sequence
  Non-cyclic GFR-binding peptide
FYLMNIPSTKVP

SEQ ID NO: 2888 - protein, 17 aa, Artificial Sequence
  Non-cyclic GFR-binding peptide
  MOD_RES (14)..(15): Xaa is C or S
FYLVNIPSLQTPAXXPK

SEQ ID NO: 2889 - protein, 11 aa, Artificial Sequence
  Non-cyclic GFR-binding peptide
FYLVNIPSLQT

SEQ ID NO: 2890 - protein, 14 aa, Artificial Sequence
  Non-cyclic GFR-binding peptide
  MOD_RES (14)..(14): Xaa is C or S
FYLMNIPSLETPVX

SEQ ID NO: 2891 - protein, 18 aa, Artificial Sequence
  Non-cyclic GFR-binding peptide
  MOD_RES (14)..(15): Xaa is C or S
FYLMNIPSTKVPAXXTSP

SEQ ID NO: 2892 - protein, 19 aa, Artificial Sequence
  Non-cyclic GFR-binding peptide
  MOD_RES (14)..(15): Xaa is C or S
FYLVNIPSLQTPAXXPKPV

SEQ ID NO: 2893 - protein, 16 aa, Artificial Sequence
  Non-cyclic GFR-binding peptide
  MOD_RES (14)..(15): Xaa is C or S
FYLVNIPSLKTPVXXA

SEQ ID NO: 2894 - protein, 10 aa, Artificial Sequence
  Non-cyclic GFR-binding peptide
FYLMNIPSTK

SEQ ID NO: 2895 - protein, 18 aa, Artificial Sequence
  Non-cyclic GFR-binding peptide
  MOD_RES (14)..(15): Xaa is C or S
FYLINIPSLRTPVXXTPP

SEQ ID NO: 2896 - protein, 18 aa, Artificial Sequence
  Non-cyclic GFR-binding peptide
  MOD_RES (14)..(15): Xaa is C or S
FYLVNIPSLQTPAXXPKP

SEQ ID NO: 2897 - protein, 18 aa, Artificial Sequence
  Non-cyclic GFR-binding peptide
  MOD_RES (14)..(15): Xaa is C or S
FYLVNIPSLKTPAXXPKP

SEQ ID NO: 2898 - protein, 16 aa, Artificial Sequence
  Non-cyclic GFR-binding peptide
  MOD_RES (14)..(15): Xaa is C or S
FYLVNIPSLKTPAXXA

SEQ ID NO: 2899 - protein, 18 aa, Artificial Sequence
  Non-cyclic GFR-binding peptide
  MOD_RES (14)..(15): Xaa is C or S
FYLINIPSLKTPVXXAKS

SEQ ID NO: 2900 - protein, 13 aa, Artificial Sequence
  Non-cyclic GFR-binding peptide
FYLMNIPSLETPV

SEQ ID NO: 2901 - protein, 16 aa, Artificial Sequence
  Non-cyclic GFR-binding peptide
  MOD_RES (14)..(15): Xaa is C or S
FYLINIPSLKTPVXXA

SEQ ID NO: 2902 - protein, 13 aa, Artificial Sequence
  Non-cyclic GFR-binding peptide
FYLINIPSLRAPV

SEQ ID NO: 2903 - protein, 11 aa, Artificial Sequence
  Non-cyclic GFR-binding peptide
FYLINIPSLRT

SEQ ID NO: 2904 - protein, 20 aa, Artificial Sequence
  Non-cyclic GFR-binding peptide
  MOD_RES (14)..(15): Xaa is C or S
FYLVNIPSLKTPAXXPKPVH

SEQ ID NO: 2905 - protein, 15 aa, Artificial Sequence
  Non-cyclic GFR-binding peptide
  MOD_RES (14)..(15): Xaa is C or S
FYLINIPSLRTPVXX

SEQ ID NO: 2906 - protein, 9 aa, Artificial Sequence
  Non-cyclic GFR-binding peptide
FYLVNIPSL

SEQ ID NO: 2907 - protein, 16 aa, Artificial Sequence
  Non-cyclic GFR-binding peptide
  MOD_RES (14)..(14): Xaa is C or S
FYLVNIPSLKTPAXTP

SEQ ID NO: 2908 - protein, 15 aa, Artificial Sequence
  Non-cyclic GFR-binding peptide
  MOD_RES (14)..(15): Xaa is C or S
FYLVNIPSLKTPVXX

SEQ ID NO: 2909 - protein, 12 aa, Artificial Sequence
  Non-cyclic GFR-binding peptide
FYLINIPSLRTP

SEQ ID NO: 2910 - protein, 15 aa, Artificial Sequence
  Non-cyclic GFR-binding peptide
  MOD_RES (14)..(15): Xaa is C or S
FYLVNIPSLKTPAXX

SEQ ID NO: 2911 - protein, 11 aa, Artificial Sequence
  Non-cyclic GFR-binding peptide
FYLMNIPSTKV

SEQ ID NO: 2912 - protein, 17 aa, Artificial Sequence
  Non-cyclic GFR-binding peptide
  MOD_RES (14)..(15): Xaa is C or S
FYLMNIPSLETPVXXAK

SEQ ID NO: 2913 - protein, 12 aa, Artificial Sequence
  Non-cyclic GFR-binding peptide
FYLVNIPSLQTP

SEQ ID NO: 2914 - protein, 15 aa, Artificial Sequence
  Non-cyclic GFR-binding peptide
  MOD_RES (14)..(15): Xaa is C or S
FYLINIPSLKTPVXX

SEQ ID NO: 2915 - skipped

SEQ ID NO: 2916 - protein, 11 aa, Artificial Sequence
  Non-cyclic GFR-binding peptide
FYLINIPSLKT

SEQ ID NO: 2917 - protein, 12 aa, Artificial Sequence
  Non-cyclic GFR-binding peptide
FYLVNIPSLKTP

SEQ ID NO: 2918 - protein, 18 aa, Artificial Sequence
  Non-cyclic GFR-binding peptide
  MOD_RES (14)..(15): Xaa is C or S
FYLVNIPSLKTPVXXAKG

SEQ ID NO: 2919 - protein, 15 aa, Artificial Sequence
  Non-cyclic GFR-binding peptide
  MOD_RES (14)..(15): Xaa is C or S
FYLVNIPSLQTPAXX

SEQ ID NO: 2920 - protein, 19 aa, Artificial Sequence
  Non-cyclic GFR-binding peptide
  MOD_RES (14)..(15): Xaa is C or S
FYLMNIPSTKVPAXXTSPV

SEQ ID NO: 2921 - protein, 9 aa, Artificial Sequence
  Non-cyclic GFR-binding peptide
FYLINIPSL

SEQ ID NO: 2922 - protein, 17 aa, Artificial Sequence
  Non-cyclic GFR-binding peptide
  MOD_RES (14)..(15): Xaa is C or S
FYLMNIPSTKVPAXXTS

SEQ ID NO: 2923 - protein, 15 aa, Artificial Sequence
  Non-cyclic GFR-binding peptide
  MOD_RES (14)..(14): Xaa is C or S
FYLVNIPSLKTPAXT

SEQ ID NO: 2924 - protein, 12 aa, Artificial Sequence
  Non-cyclic GFR-binding peptide
FYLINIPSLRAP

SEQ ID NO: 2925 - protein, 16 aa, Artificial Sequence
  Non-cyclic GFR-binding peptide
  MOD_RES (14)..(15): Xaa is C or S
FYLVNIPSLQTPAXXP

SEQ ID NO: 2926 - protein, 20 aa, Artificial Sequence
  Non-cyclic GFR-binding peptide
  MOD_RES (14)..(15): Xaa is C or S
FYLVNIPSLKTPAXXPKPVY

SEQ ID NO: 2927 - protein, 10 aa, Artificial Sequence
  Non-cyclic GFR-binding peptide
FYLMNIPSLE

SEQ ID NO: 2928 - protein, 18 aa, Artificial Sequence
  Non-cyclic GFR-binding peptide
  MOD_RES (14)..(15): Xaa is C or S
FYLVNIPSLKTPAXXAKP

SEQ ID NO: 2929 - protein, 18 aa, Artificial Sequence
  Non-cyclic GFR-binding peptide
  MOD_RES (14)..(15): Xaa is C or S
FYLINIPSLRAPVXXSAP

SEQ ID NO: 2930 - protein, 19 aa, Artificial Sequence
  Non-cyclic GFR-binding peptide
  MOD_RES (14)..(15): Xaa is C or S
FYLINIPSLRAPVXXSAPA

SEQ ID NO: 2931 - protein, 14 aa, Artificial Sequence
  Non-cyclic GFR-binding peptide
  MOD_RES (14)..(14): Xaa is C or S
FYLMNIPSTKVPAX

SEQ ID NO: 2932 - protein, 17 aa, Artificial Sequence
  Non-cyclic GFR-binding peptide
  MOD_RES (14)..(15): Xaa is C or S
FYLINIPSLKTPVXXAK

SEQ ID NO: 2933 - protein, 10 aa, Artificial Sequence
  Non-cyclic GFR-binding peptide
FYLINIPSLK

SEQ ID NO: 2934 - protein, 11 aa, Artificial Sequence
  Non-cyclic GFR-binding peptide
FYLVNIPSLKT

SEQ ID NO: 2935 - protein, 17 aa, Artificial Sequence
  Non-cyclic GFR-binding peptide
  MOD_RES (14)..(15): Xaa is C or S
FYLVNIPSLKTPAXXPK

SEQ ID NO: 2936 - protein, 20 aa, Artificial Sequence
  Non-cyclic GFR-binding peptide
  MOD_RES (14)..(15): Xaa is C or S
FYLINIPSLRTPVXXTPPTS

SEQ ID NO: 2937 - protein, 9 aa, Artificial Sequence
  Non-cyclic GFR-binding peptide
FYLMNIPST

SEQ ID NO: 2938 - protein, 17 aa, Artificial Sequence
  Non-cyclic GFR-binding peptide
  MOD_RES (14)..(15): Xaa is C or S
FYLINIPSLRAPVXXSA

SEQ ID NO: 2939 - protein, 19 aa, Artificial Sequence
  Non-cyclic GFR-binding peptide
  MOD_RES (14)..(15): Xaa is C or S
FYLVNIPSLKTPVXXAKGV

SEQ ID NO: 2940 - protein, 14 aa, Artificial Sequence
  Non-cyclic GFR-binding peptide
  MOD_RES (14)..(14): Xaa is C or S
FYLVNIPSLKTPAX

SEQ ID NO: 2941 - protein, 20 aa, Artificial Sequence
  Non-cyclic GFR-binding peptide
  MOD_RES (14)..(14): Xaa is C or S
FYLVNIPSLKTPAXTPKTVH

SEQ ID NO: 2942 - protein, 20 aa, Artificial Sequence
  Non-cyclic GFR-binding peptide
  MOD_RES (14)..(15): Xaa is C or S
FYLVNIPSLKTPAXXAKPVA

SEQ ID NO: 2943 - protein, 19 aa, Artificial Sequence
  Non-cyclic GFR-binding peptide
  MOD_RES (14)..(15): Xaa is C or S
FYLINIPSLRTPVXXTPPT

SEQ ID NO: 2944 - protein, 14 aa, Artificial Sequence
  Non-cyclic GFR-binding peptide
  MOD_RES (14)..(14): Xaa is C or S
FYLINIPSLRAPVX

SEQ ID NO: 2945 - protein, 17 aa, Artificial Sequence
  Non-cyclic GFR-binding peptide
  MOD_RES (14)..(15): Xaa is C or S
FYLVNIPSLKTPVXXAK

SEQ ID NO: 2946 - protein, 19 aa, Artificial Sequence
  Non-cyclic GFR-binding peptide
  MOD_RES (14)..(15): Xaa is C or S
FYLVNIPSLKTPAXXPKPV

SEQ ID NO: 2947 - protein, 19 aa, Artificial Sequence
  Non-cyclic GFR-binding peptide
  MOD_RES (14)..(15): Xaa is C or S
FYLINIPSLKTPVXXAKSA

SEQ ID NO: 2948 - protein, 20 aa, Artificial Sequence
  Non-cyclic GFR-binding peptide
  MOD_RES (14)..(15): Xaa is C or S
FYLMNIPSTKVPAXXTSPVR

SEQ ID NO: 2949 - protein, 16 aa, Artificial Sequence
  Non-cyclic GFR-binding peptide
  MOD_RES (2)..(3): Xaa is C or S
AXXVPTELSPINMLYF

SEQ ID NO: 2950 - protein, 13 aa, Artificial Sequence
  Non-cyclic GFR-binding peptide
APTKLSPINVLYF

SEQ ID NO: 2951 - protein, 14 aa, Artificial Sequence
  Non-cyclic GFR-binding peptide
  MOD_RES (1)..(1): Xaa is C or S
XVPTKLSPINILYF

SEQ ID NO: 2952 - protein, 16 aa, Artificial Sequence
  Non-cyclic GFR-binding peptide
  MOD_RES (2)..(3): Xaa is C or S
SXXVPARLSPINILYF

SEQ ID NO: 2953 - protein, 15 aa, Artificial Sequence
  Non-cyclic GFR-binding peptide
  MOD_RES (1)..(2): Xaa is C or S
XXAPVKTSPINMLYF

SEQ ID NO: 2954 - protein, 14 aa, Artificial Sequence
  Non-cyclic GFR-binding peptide
  MOD_RES (1)..(1): Xaa is C or S
XAPTQLSPINVLYF

SEQ ID NO: 2955 - protein, 19 aa, Artificial Sequence
  Non-cyclic GFR-binding peptide
  MOD_RES (5)..(6): Xaa is C or S
IPKAXXVPTELSPINMLYF

SEQ ID NO: 2956 - protein, 13 aa, Artificial Sequence
  Non-cyclic GFR-binding peptide
VPTRLSPINILYF

SEQ ID NO: 2957 - protein, 20 aa, Artificial Sequence
  Non-cyclic GFR-binding peptide
  MOD_RES (6)..(7): Xaa is C or S
AAPASXXVPARLSPINILYF

SEQ ID NO: 2958 - protein, 13 aa, Artificial Sequence
  Non-cyclic GFR-binding peptide
VPTKLSPINVLYF

SEQ ID NO: 2959 - protein, 17 aa, Artificial Sequence
  Non-cyclic GFR-binding peptide
  MOD_RES (3)..(4): Xaa is C or S
KAXXAPTKLSPINVLYF

SEQ ID NO: 2960 - protein, 10 aa, Artificial Sequence
  Non-cyclic GFR-binding peptide
QLSPINVLYF

SEQ ID NO: 2961 - protein, 10 aa, Artificial Sequence
  Non-cyclic GFR-binding peptide
RLSPINILYF

SEQ ID NO: 2962 - protein, 10 aa, Artificial Sequence
  Non-cyclic GFR-binding peptide
KLSPINVLYF

SEQ ID NO: 2963 - protein, 15 aa, Artificial Sequence
  Non-cyclic GFR-binding peptide
  MOD_RES (1)..(2): Xaa is C or S
XXVPTELSPINMLYF

SEQ ID NO: 2964 - protein, 16 aa, Artificial Sequence
  Non-cyclic GFR-binding peptide
  MOD_RES (2)..(3): Xaa is C or S
TXXVPTRLSPINILYF

SEQ ID NO: 2965 - protein, 14 aa, Artificial Sequence
  Non-cyclic GFR-binding peptide
  MOD_RES (1)..(1): Xaa is C or S
XVPTRLSPINILYF

SEQ ID NO: 2966 - protein, 17 aa, Artificial Sequence
  Non-cyclic GFR-binding peptide
  MOD_RES (4)..(4): Xaa is C or S
KPTXAPTKLSPINVLYF

SEQ ID NO: 2967 - protein, 20 aa, Artificial Sequence
  Non-cyclic GFR-binding peptide
  MOD_RES (6)..(7): Xaa is C or S
KASKAXXVPTKLSPINILYF

SEQ ID NO: 2968 - protein, 11 aa, Artificial Sequence
  Non-cyclic GFR-binding peptide
TELSPINMLYF

SEQ ID NO: 2969 - protein, 11 aa, Artificial Sequence
  Non-cyclic GFR-binding peptide
ARLSPINILYF

SEQ ID NO: 2970 - protein, 19 aa, Artificial Sequence
  Non-cyclic GFR-binding peptide
  MOD_RES (6)..(6): Xaa is C or S
VTKPTXAPTKLSPINVLYF

SEQ ID NO: 2971 - protein, 13 aa, Artificial Sequence
  Non-cyclic GFR-binding peptide
VPTKLSPINILYF

SEQ ID NO: 2972 - protein, 20 aa, Artificial Sequence
  Non-cyclic GFR-binding peptide
  MOD_RES (6)..(7): Xaa is C or S
SIPKAXXVPTELSPINMLYF

SEQ ID NO: 2973 - protein, 17 aa, Artificial Sequence
  Non-cyclic GFR-binding peptide
  MOD_RES (3)..(4): Xaa is C or S
PTXXVPTRLSPINILYF

SEQ ID NO: 2974 - protein, 13 aa, Artificial Sequence
  Non-cyclic GFR-binding peptide
APTQLSPINVLYF

SEQ ID NO: 2975 - protein, 9 aa, Artificial Sequence
  Non-cyclic GFR-binding peptide
LSPINMLYF

SEQ ID NO: 2976 - protein, 16 aa, Artificial Sequence
  Non-cyclic GFR-binding peptide
  MOD_RES (2)..(3): Xaa is C or S
TXXAPVKTSPINMLYF

SEQ ID NO: 2977 - protein, 12 aa, Artificial Sequence
  Non-cyclic GFR-binding peptide
PTKLSPINILYF

SEQ ID NO: 2978 - protein, 20 aa, Artificial Sequence
  Non-cyclic GFR-binding peptide
  MOD_RES (6)..(7): Xaa is C or S
TVPKPXXAPTQLSPINVLYF

SEQ ID NO: 2979 - protein, 20 aa, Artificial Sequence
  Non-cyclic GFR-binding peptide
  MOD_RES (6)..(7): Xaa is C or S
KVGKAXXVPTKLSPINVLYF

SEQ ID NO: 2980 - protein, 12 aa, Artificial Sequence
  Non-cyclic GFR-binding peptide
PTELSPINMLYF

SEQ ID NO: 2981 - protein, 14 aa, Artificial Sequence
  Non-cyclic GFR-binding peptide
  MOD_RES (1)..(1): Xaa is C or S
XVPTKLSPINVLYF

SEQ ID NO: 2982 - protein, 18 aa, Artificial Sequence
  Non-cyclic GFR-binding peptide
  MOD_RES (4)..(5): Xaa is C or S
PKAXXVPTELSPINMLYF

SEQ ID NO: 2983 - protein, 16 aa, Artificial Sequence
  Non-cyclic GFR-binding peptide
  MOD_RES (2)..(3): Xaa is C or S
PXXAPTKLSPINVLYF

SEQ ID NO: 2984 - protein, 18 aa, Artificial Sequence
  Non-cyclic GFR-binding peptide
  MOD_RES (5)..(5): Xaa is C or S
TKPTXAPTKLSPINVLYF

SEQ ID NO: 2985 - protein, 15 aa, Artificial Sequence
  Non-cyclic GFR-binding peptide
  MOD_RES (1)..(2): Xaa is C or S
XXVPARLSPINILYF

SEQ ID NO: 2986 - protein, 19 aa, Artificial Sequence
  Non-cyclic GFR-binding peptide
  MOD_RES (5)..(6): Xaa is C or S
VPKAXXAPTKLSPINVLYF

SEQ ID NO: 2987 - protein, 20 aa, Artificial Sequence
  Non-cyclic GFR-binding peptide
  MOD_RES (6)..(7): Xaa is C or S
KIPKAXXVPTELSPINMLYF

SEQ ID NO: 2988 - protein, 13 aa, Artificial Sequence
  Non-cyclic GFR-binding peptide
APVKTSPINMLYF

SEQ ID NO: 2989 - protein, 12 aa, Artificial Sequence
  Non-cyclic GFR-binding peptide
PVKTSPINMLYF

SEQ ID NO: 2990 - protein, 17 aa, Artificial Sequence
  Non-cyclic GFR-binding peptide
  MOD_RES (3)..(4): Xaa is C or S
KPXXAPTQLSPINVLYF

SEQ ID NO: 2991 - protein, 11 aa, Artificial Sequence
  Non-cyclic GFR-binding peptide
TQLSPINVLYF

SEQ ID NO: 2992 - protein, 14 aa, Artificial Sequence
  Non-cyclic GFR-binding peptide
  MOD_RES (1)..(1): Xaa is C or S
XVPTELSPINMLYF

SEQ ID NO: 2993 - protein, 18 aa, Artificial Sequence
  Non-cyclic GFR-binding peptide
  MOD_RES (4)..(5): Xaa is C or S
PSTXXAPVKTSPINMLYF

SEQ ID NO: 2994 - protein, 19 aa, Artificial Sequence
  Non-cyclic GFR-binding peptide
  MOD_RES (5)..(6): Xaa is C or S
VPKPXXAPTQLSPINVLYF

SEQ ID NO: 2995 - protein, 16 aa, Artificial Sequence
  Non-cyclic GFR-binding peptide
  MOD_RES (2)..(3): Xaa is C or S
AXXVPTKLSPINVLYF

SEQ ID NO: 2996 - protein, 10 aa, Artificial Sequence
  Non-cyclic GFR-binding peptide
KTSPINMLYF

SEQ ID NO: 2997 - protein, 18 aa, Artificial Sequence
  Non-cyclic GFR-binding peptide
  MOD_RES (4)..(5): Xaa is C or S
PPTXXVPTRLSPINILYF

SEQ ID NO: 2998 - protein, 18 aa, Artificial Sequence
  Non-cyclic GFR-binding peptide
  MOD_RES (4)..(5): Xaa is C or S
PKPXXAPTQLSPINVLYF

SEQ ID NO: 2999 - protein, 18 aa, Artificial Sequence
  Non-cyclic GFR-binding peptide
  MOD_RES (4)..(5): Xaa is C or S
PKPXXAPTKLSPINVLYF

SEQ ID NO: 3000 - protein, 16 aa, Artificial Sequence
  Non-cyclic GFR-binding peptide
  MOD_RES (2)..(3): Xaa is C or S
AXXAPTKLSPINVLYF

SEQ ID NO: 3001 - protein, 18 aa, Artificial Sequence
  Non-cyclic GFR-binding peptide
  MOD_RES (4)..(5): Xaa is C or S
SKAXXVPTKLSPINILYF

SEQ ID NO: 3002 - protein, 13 aa, Artificial Sequence
  Non-cyclic GFR-binding peptide
VPTELSPINMLYF

SEQ ID NO: 3003 - protein, 16 aa, Artificial Sequence
  Non-cyclic GFR-binding peptide
  MOD_RES (2)..(3): Xaa is C or S
AXXVPTKLSPINILYF

SEQ ID NO: 3004 - protein, 13 aa, Artificial Sequence
  Non-cyclic GFR-binding peptide
VPARLSPINILYF

SEQ ID NO: 3005 - protein, 11 aa, Artificial Sequence
  Non-cyclic GFR-binding peptide
TRLSPINILYF

SEQ ID NO: 3006 - protein, 20 aa, Artificial Sequence
  Non-cyclic GFR-binding peptide
  MOD_RES (6)..(7): Xaa is C or S
HVPKPXXAPTKLSPINVLYF

SEQ ID NO: 3007 - protein, 15 aa, Artificial Sequence
  Non-cyclic GFR-binding peptide
  MOD_RES (1)..(2): Xaa is C or S
XXVPTRLSPINILYF

SEQ ID NO: 3008 - protein, 9 aa, Artificial Sequence
  Non-cyclic GFR-binding peptide
LSPINVLYF

SEQ ID NO: 3009 - protein, 16 aa, Artificial Sequence
  Non-cyclic GFR-binding peptide
  MOD_RES (3)..(3): Xaa is C or S
PTXAPTKLSPINVLYF

SEQ ID NO: 3010 - protein, 15 aa, Artificial Sequence
  Non-cyclic GFR-binding peptide
  MOD_RES (1)..(2): Xaa is C or S
XXVPTKLSPINVLYF

SEQ ID NO: 3011 - protein, 12 aa, Artificial Sequence
  Non-cyclic GFR-binding peptide
PTRLSPINILYF

SEQ ID NO: 3012 - protein, 15 aa, Artificial Sequence
  Non-cyclic GFR-binding peptide
  MOD_RES (1)..(2): Xaa is C or S
XXAPTKLSPINVLYF

SEQ ID NO: 3013 - protein, 11 aa, Artificial Sequence
  Non-cyclic GFR-binding peptide
VKTSPINMLYF

SEQ ID NO: 3014 - protein, 17 aa, Artificial Sequence
  Non-cyclic GFR-binding peptide
  MOD_RES (3)..(4): Xaa is C or S
KAXXVPTELSPINMLYF

SEQ ID NO: 3015 - protein, 12 aa, Artificial Sequence
  Non-cyclic GFR-binding peptide
PTQLSPINVLYF

SEQ ID NO: 3016 - protein, 15 aa, Artificial Sequence
  Non-cyclic GFR-binding peptide
  MOD_RES (1)..(2): Xaa is C or S
XXVPTKLSPINILYF

SEQ ID NO: 3017 - skipped

SEQ ID NO: 3018 - protein, 11 aa, Artificial Sequence
  Non-cyclic GFR-binding peptide
TKLSPINILYF

SEQ ID NO: 3019 - protein, 12 aa, Artificial Sequence
  Non-cyclic GFR-binding peptide
PTKLSPINVLYF

SEQ ID NO: 3020 - protein, 18 aa, Artificial Sequence
  Non-cyclic GFR-binding peptide
  MOD_RES (4)..(5): Xaa is C or S
GKAXXVPTKLSPINVLYF

SEQ ID NO: 3021 - protein, 15 aa, Artificial Sequence
  Non-cyclic GFR-binding peptide
  MOD_RES (1)..(2): Xaa is C or S
XXAPTQLSPINVLYF

SEQ ID NO: 3022 - protein, 19 aa, Artificial Sequence
  Non-cyclic GFR-binding peptide
  MOD_RES (5)..(6): Xaa is C or S
VPSTXXAPVKTSPINMLYF

SEQ ID NO: 3023 - protein, 9 aa, Artificial Sequence
  Non-cyclic GFR-binding peptide
LSPINILYF

SEQ ID NO: 3024 - protein, 17 aa, Artificial Sequence
  Non-cyclic GFR-binding peptide
  MOD_RES (3)..(4): Xaa is C or S
STXXAPVKTSPINMLYF

SEQ ID NO: 3025 - protein, 15 aa, Artificial Sequence
  Non-cyclic GFR-binding peptide
  MOD_RES (2)..(2): Xaa is C or S
TXAPTKLSPINVLYF

SEQ ID NO: 3026 - protein, 12 aa, Artificial Sequence
  Non-cyclic GFR-binding peptide
PARLSPINILYF

SEQ ID NO: 3027 - protein, 16 aa, Artificial Sequence
  Non-cyclic GFR-binding peptide
  MOD_RES (2)..(3): Xaa is C or S
PXXAPTQLSPINVLYF

SEQ ID NO: 3028 - protein, 20 aa, Artificial Sequence
  Non-cyclic GFR-binding peptide
  MOD_RES (6)..(7): Xaa is C or S
YVPKPXXAPTKLSPINVLYF

SEQ ID NO: 3029 - protein, 10 aa, Artificial Sequence
  Non-cyclic GFR-binding peptide
ELSPINMLYF

SEQ ID NO: 3030 - protein, 18 aa, Artificial Sequence
  Non-cyclic GFR-binding peptide
  MOD_RES (4)..(5): Xaa is C or S
PKAXXAPTKLSPINVLYF

SEQ ID NO: 3031 - protein, 18 aa, Artificial Sequence
  Non-cyclic GFR-binding peptide
  MOD_RES (4)..(5): Xaa is C or S
PASXXVPARLSPINILYF

SEQ ID NO: 3032 - protein, 19 aa, Artificial Sequence
  Non-cyclic GFR-binding peptide
  MOD_RES (5)..(6): Xaa is C or S
APASXXVPARLSPINILYF

SEQ ID NO: 3033 - protein, 14 aa, Artificial Sequence
  Non-cyclic GFR-binding peptide
  MOD_RES (1)..(1): Xaa is C or S
XAPVKTSPINMLYF

SEQ ID NO: 3034 - protein, 17 aa, Artificial Sequence
  Non-cyclic GFR-binding peptide
  MOD_RES (3)..(4): Xaa is C or S
KAXXVPTKLSPINILYF

SEQ ID NO: 3035 - protein, 10 aa, Artificial Sequence
  Non-cyclic GFR-binding peptide
KLSPINILYF

SEQ ID NO: 3036 - protein, 11 aa, Artificial Sequence
  Non-cyclic GFR-binding peptide
TKLSPINVLYF

SEQ ID NO: 3037 - protein, 17 aa, Artificial Sequence
  Non-cyclic GFR-binding peptide
  MOD_RES (3)..(4): Xaa is C or S
KPXXAPTKLSPINVLYF

SEQ ID NO: 3038 - protein, 20 aa, Artificial Sequence
  Non-cyclic GFR-binding peptide
  MOD_RES (6)..(7): Xaa is C or S
STPPTXXVPTRLSPINILYF

SEQ ID NO: 3039 - protein, 9 aa, Artificial Sequence
  Non-cyclic GFR-binding peptide
TSPINMLYF

SEQ ID NO: 3040 - protein, 17 aa, Artificial Sequence
  Non-cyclic GFR-binding peptide
  MOD_RES (3)..(4): Xaa is C or S
ASXXVPARLSPINILYF

SEQ ID NO: 3041 - protein, 19 aa, Artificial Sequence
  Non-cyclic GFR-binding peptide
  MOD_RES (5)..(6): Xaa is C or S
VGKAXXVPTKLSPINVLYF

SEQ ID NO: 3042 - protein, 14 aa, Artificial Sequence
  Non-cyclic GFR-binding peptide
  MOD_RES (1)..(1): Xaa is C or S
XAPTKLSPINVLYF

SEQ ID NO: 3043 - protein, 20 aa, Artificial Sequence
  Non-cyclic GFR-binding peptide
  MOD_RES (7)..(7): Xaa is C or S
HVTKPTXAPTKLSPINVLYF

SEQ ID NO: 3044 - protein, 20 aa, Artificial Sequence
  Non-cyclic GFR-binding peptide
  MOD_RES (6)..(7): Xaa is C or S
AVPKAXXAPTKLSPINVLYF

SEQ ID NO: 3045 - protein, 19 aa, Artificial Sequence
  Non-cyclic GFR-binding peptide
  MOD_RES (5)..(6): Xaa is C or S
TPPTXXVPTRLSPINILYF

SEQ ID NO: 3046 - protein, 14 aa, Artificial Sequence
  Non-cyclic GFR-binding peptide
  MOD_RES (1)..(1): Xaa is C or S
XVPARLSPINILYF

SEQ ID NO: 3047 - protein, 17 aa, Artificial Sequence
  Non-cyclic GFR-binding peptide
  MOD_RES (3)..(4): Xaa is C or S
KAXXVPTKLSPINVLYF

SEQ ID NO: 3048 - protein, 19 aa, Artificial Sequence
  Non-cyclic GFR-binding peptide
  MOD_RES (5)..(6): Xaa is C or S
VPKPXXAPTKLSPINVLYF

SEQ ID NO: 3049 - protein, 19 aa, Artificial Sequence
  Non-cyclic GFR-binding peptide
  MOD_RES (5)..(6): Xaa is C or S
ASKAXXVPTKLSPINILYF

SEQ ID NO: 3050 - protein, 20 aa, Artificial Sequence
  Non-cyclic GFR-binding peptide
  MOD_RES (6)..(7): Xaa is C or S
RVPSTXXAPVKTSPINMLYF

SEQ ID NO: 3051 - protein, 14 aa, Artificial Sequence
  Non-cyclic GFR-binding peptide
  MOD_RES (14)..(14): Xaa is C or S
IYLISIPSLRTPVX

SEQ ID NO: 3052 - protein, 20 aa, Artificial Sequence
  Non-cyclic GFR-binding peptide
  MOD_RES (14)..(15): Xaa is C or S
IYLMSIPSMKTPTXXPGASG

SEQ ID NO: 3053 - protein, 11 aa, Artificial Sequence
  Non-cyclic GFR-binding peptide
IYLMSIPSMKT

SEQ ID NO: 3054 - protein, 15 aa, Artificial Sequence
  Non-cyclic GFR-binding peptide
  MOD_RES (14)..(15): Xaa is C or S
IYLMSIPSTKVPAXX

SEQ ID NO: 3055 - protein, 10 aa, Artificial Sequence
  Non-cyclic GFR-binding peptide
IYLMSIPSMK

SEQ ID NO: 3056 - protein, 13 aa, Artificial Sequence
  Non-cyclic GFR-binding peptide
IYLMSIPSMKTPT

SEQ ID NO: 3057 - protein, 17 aa, Artificial Sequence
  Non-cyclic GFR-binding peptide
  MOD_RES (14)..(15): Xaa is C or S
IYLMSIPSMKTPTXXPG

SEQ ID NO: 3058 - protein, 14 aa, Artificial Sequence
  Non-cyclic GFR-binding peptide
  MOD_RES (14)..(14): Xaa is C or S
IYLMSIPSTKVPAX

SEQ ID NO: 3059 - protein, 19 aa, Artificial Sequence
  Non-cyclic GFR-binding peptide
  MOD_RES (14)..(15): Xaa is C or S
IYLISIPSLRTPVXXTPPT

SEQ ID NO: 3060 - protein, 20 aa, Artificial Sequence
  Non-cyclic GFR-binding peptide
  MOD_RES (14)..(15): Xaa is C or S
IYLVSIPSLKTPAXXPKPVH

SEQ ID NO: 3061 - protein, 9 aa, Artificial Sequence
  Non-cyclic GFR-binding peptide
IYLMSIPSM

SEQ ID NO: 3062 - protein, 12 aa, Artificial Sequence
  Non-cyclic GFR-binding peptide
IYLISIPSLRTP

SEQ ID NO: 3063 - protein, 19 aa, Artificial Sequence
  Non-cyclic GFR-binding peptide
  MOD_RES (14)..(15): Xaa is C or S
IYLMSIPSTKVPAXXTSPV

SEQ ID NO: 3064 - protein, 11 aa, Artificial Sequence
  Non-cyclic GFR-binding peptide
IYLMSIPSTKV

SEQ ID NO: 3065 - protein, 20 aa, Artificial Sequence
  Non-cyclic GFR-binding peptide
  MOD_RES (14)..(15): Xaa is C or S
IYLMSIPSTKVPAXXTSPVR

SEQ ID NO: 3066 - protein, 18 aa, Artificial Sequence
  Non-cyclic GFR-binding peptide
  MOD_RES (14)..(15): Xaa is C or S
IYLMSIPSTKVPAXXTSP

SEQ ID NO: 3067 - protein, 10 aa, Artificial Sequence
  Non-cyclic GFR-binding peptide
IYLMSIPSTK

SEQ ID NO: 3068 - protein, 12 aa, Artificial Sequence
  Non-cyclic GFR-binding peptide
IYLMSIPSTKVP

SEQ ID NO: 3069 - protein, 15 aa, Artificial Sequence
  Non-cyclic GFR-binding peptide
  MOD_RES (14)..(15): Xaa is C or S
IYLMSIPSMKTPTXX

SEQ ID NO: 3070 - protein, 16 aa, Artificial Sequence
  Non-cyclic GFR-binding peptide
  MOD_RES (14)..(15): Xaa is C or S
IYLMSIPSMKTPTXXP

SEQ ID NO: 3071 - protein, 18 aa, Artificial Sequence
  Non-cyclic GFR-binding peptide
  MOD_RES (14)..(15): Xaa is C or S
IYLISIPSLRTPVXXTPP

SEQ ID NO: 3072 - protein, 15 aa, Artificial Sequence
  Non-cyclic GFR-binding peptide
  MOD_RES (14)..(15): Xaa is C or S
IYLISIPSLRTPVXX

SEQ ID NO: 3073 - protein, 13 aa, Artificial Sequence
  Non-cyclic GFR-binding peptide
IYLISIPSLRTPV

SEQ ID NO: 3074 - protein, 16 aa, Artificial Sequence
  Non-cyclic GFR-binding peptide
  MOD_RES (14)..(15): Xaa is C or S
IYLISIPSLRTPVXXT

SEQ ID NO: 3075 - protein, 18 aa, Artificial Sequence
  Non-cyclic GFR-binding peptide
  MOD_RES (14)..(15): Xaa is C or S
IYLMSIPSMKTPTXXPGA

SEQ ID NO: 3076 - protein, 20 aa, Artificial Sequence
  Non-cyclic GFR-binding peptide
  MOD_RES (14)..(15): Xaa is C or S
IYLISIPSLRTPVXXTPPTS

SEQ ID NO: 3077 - protein, 13 aa, Artificial Sequence
  Non-cyclic GFR-binding peptide
IYLMSIPSTKVPA

SEQ ID NO: 3078 - protein, 9 aa, Artificial Sequence
  Non-cyclic GFR-binding peptide
IYLMSIPST

SEQ ID NO: 3079 - protein, 16 aa, Artificial Sequence
  Non-cyclic GFR-binding peptide
  MOD_RES (14)..(15): Xaa is C or S
IYLMSIPSTKVPAXXT

SEQ ID NO: 3080 - protein, 11 aa, Artificial Sequence
  Non-cyclic GFR-binding peptide
IYLISIPSLRT

SEQ ID NO: 3081 - protein, 17 aa, Artificial Sequence
  Non-cyclic GFR-binding peptide
  MOD_RES (14)..(15): Xaa is C or S
IYLISIPSLRTPVXXTP

SEQ ID NO: 3082 - protein, 17 aa, Artificial Sequence
  Non-cyclic GFR-binding peptide
  MOD_RES (14)..(15): Xaa is C or S
IYLMSIPSTKVPAXXTS

SEQ ID NO: 3083 - protein, 14 aa, Artificial Sequence
  Non-cyclic GFR-binding peptide
  MOD_RES (14)..(14): Xaa is C or S
IYLMSIPSMKTPTX

SEQ ID NO: 3084 - protein, 12 aa, Artificial Sequence
  Non-cyclic GFR-binding peptide
IYLMSIPSMKTP

SEQ ID NO: 3085 - protein, 19 aa, Artificial Sequence
  Non-cyclic GFR-binding peptide
  MOD_RES (14)..(15): Xaa is C or S
IYLMSIPSMKTPTXXPGAS

SEQ ID NO: 3086 - protein, 14 aa, Artificial Sequence
  Non-cyclic GFR-binding peptide
  MOD_RES (1)..(1): Xaa is C or S
XVPTRLSPISILYI

SEQ ID NO: 3087 - protein, 20 aa, Artificial Sequence
  Non-cyclic GFR-binding peptide
  MOD_RES (6)..(7): Xaa is C or S
GSAGPXXTPTKMSPISMLYI

SEQ ID NO: 3088 - protein, 11 aa, Artificial Sequence
  Non-cyclic GFR-binding peptide
TKMSPISMLYI

SEQ ID NO: 3089 - protein, 15 aa, Artificial Sequence
  Non-cyclic GFR-binding peptide
  MOD_RES (1)..(2): Xaa is C or S
XXAPVKTSPISMLYI

SEQ ID NO: 3090 - protein, 10 aa, Artificial Sequence
  Non-cyclic GFR-binding peptide
KMSPISMLYI

SEQ ID NO: 3091 - protein, 13 aa, Artificial Sequence
  Non-cyclic GFR-binding peptide
TPTKMSPISMLYI

SEQ ID NO: 3092 - protein, 17 aa, Artificial Sequence
  Non-cyclic GFR-binding peptide
  MOD_RES (3)..(4): Xaa is C or S
GPXXTPTKMSPISMLYI

SEQ ID NO: 3093 - protein, 14 aa, Artificial Sequence
  Non-cyclic GFR-binding peptide
  MOD_RES (1)..(1): Xaa is C or S
XAPVKTSPISMLYI

SEQ ID NO: 3094 - protein, 19 aa, Artificial Sequence
  Non-cyclic GFR-binding peptide
  MOD_RES (5)..(6): Xaa is C or S
TPPTXXVPTRLSPISILYI

SEQ ID NO: 3095 - protein, 20 aa, Artificial Sequence
  Non-cyclic GFR-binding peptide
  MOD_RES (6)..(7): Xaa is C or S
HVPKPXXAPTKLSPISVLYI

SEQ ID NO: 3096 - protein, 9 aa, Artificial Sequence
  Non-cyclic GFR-binding peptide
MSPISMLYI

SEQ ID NO: 3097 - protein, 12 aa, Artificial Sequence
  Non-cyclic GFR-binding peptide
PTRLSPISILYI

SEQ ID NO: 3098 - protein, 19 aa, Artificial Sequence
  Non-cyclic GFR-binding peptide
  MOD_RES (5)..(6): Xaa is C or S
VPSTXXAPVKTSPISMLYI

SEQ ID NO: 3099 - protein, 11 aa, Artificial Sequence
  Non-cyclic GFR-binding peptide
VKTSPISMLYI

SEQ ID NO: 3100 - protein, 20 aa, Artificial Sequence
  Non-cyclic GFR-binding peptide
  MOD_RES (6)..(7): Xaa is C or S
RVPSTXXAPVKTSPISMLYI

SEQ ID NO: 3101 - protein, 18 aa, Artificial Sequence
  Non-cyclic GFR-binding peptide
  MOD_RES (4)..(5): Xaa is C or S
PSTXXAPVKTSPISMLYI

SEQ ID NO: 3102 - protein, 10 aa, Artificial Sequence
  Non-cyclic GFR-binding peptide
KTSPISMLYI

SEQ ID NO: 3103 - protein, 12 aa, Artificial Sequence
  Non-cyclic GFR-binding peptide
PVKTSPISMLYI

SEQ ID NO: 3104 - protein, 15 aa, Artificial Sequence
  Non-cyclic GFR-binding peptide
  MOD_RES (1)..(2): Xaa is C or S
XXTPTKMSPISMLYI

SEQ ID NO: 3105 - protein, 16 aa, Artificial Sequence
  Non-cyclic GFR-binding peptide
  MOD_RES (2)..(3): Xaa is C or S
PXXTPTKMSPISMLYI

SEQ ID NO: 3106 - protein, 18 aa, Artificial Sequence
  Non-cyclic GFR-binding peptide
  MOD_RES (4)..(5): Xaa is C or S
PPTXXVPTRLSPISILYI

SEQ ID NO: 3107 - protein, 15 aa, Artificial Sequence
  Non-cyclic GFR-binding peptide
  MOD_RES (1)..(2): Xaa is C or S
XXVPTRLSPISILYI

SEQ ID NO: 3108 - protein, 13 aa, Artificial Sequence
  Non-cyclic GFR-binding peptide
VPTRLSPISILYI

SEQ ID NO: 3109 - protein, 16 aa, Artificial Sequence
  Non-cyclic GFR-binding peptide
  MOD_RES (2)..(3): Xaa is C or S
TXXVPTRLSPISILYI

SEQ ID NO: 3110 - protein, 18 aa, Artificial Sequence
  Non-cyclic GFR-binding peptide
  MOD_RES (4)..(5): Xaa is C or S
AGPXXTPTKMSPISMLYI

SEQ ID NO: 3111 - protein, 20 aa, Artificial Sequence
  Non-cyclic GFR-binding peptide
  MOD_RES (6)..(7): Xaa is C or S
STPPTXXVPTRLSPISILYI

SEQ ID NO: 3112 - protein, 13 aa, Artificial Sequence
  Non-cyclic GFR-binding peptide
APVKTSPISMLYI

SEQ ID NO: 3113 - protein, 9 aa, Artificial Sequence
  Non-cyclic GFR-binding peptide
TSPISMLYI

SEQ ID NO: 3114 - protein, 16 aa, Artificial Sequence
  Non-cyclic GFR-binding peptide
  MOD_RES (2)..(3): Xaa is C or S
TXXAPVKTSPISMLYI

SEQ ID NO: 3115 - protein, 11 aa, Artificial Sequence
  Non-cyclic GFR-binding peptide
TRLSPISILYI

SEQ ID NO: 3116 - protein, 17 aa, Artificial Sequence
  Non-cyclic GFR-binding peptide
  MOD_RES (3)..(4): Xaa is C or S
PTXXVPTRLSPISILYI

SEQ ID NO: 3117 - protein, 17 aa, Artificial Sequence
  Non-cyclic GFR-binding peptide
  MOD_RES (3)..(4): Xaa is C or S
STXXAPVKTSPISMLYI

SEQ ID NO: 3118 - protein, 14 aa, Artificial Sequence
  Non-cyclic GFR-binding peptide
  MOD_RES (1)..(1): Xaa is C or S
XTPTKMSPISMLYI

SEQ ID NO: 3119 - protein, 12 aa, Artificial Sequence
  Non-cyclic GFR-binding peptide
PTKMSPISMLYI

SEQ ID NO: 3120 - protein, 19 aa, Artificial Sequence
  Non-cyclic GFR-binding peptide
  MOD_RES (5)..(6): Xaa is C or S
SAGPXXTPTKMSPISMLYI

SEQ ID NO: 3121 - protein, 12 aa, Artificial Sequence
  Non-cyclic GFR-binding peptide
FFLISLSSLRAP

SEQ ID NO: 3122 - protein, 15 aa, Artificial Sequence
  Non-cyclic GFR-binding peptide
  MOD_RES (14)..(14): Xaa is C or S
FFLVSLSSLKTPAXT

SEQ ID NO: 3123 - protein, 20 aa, Artificial Sequence
  Non-cyclic GFR-binding peptide
  MOD_RES (14)..(15): Xaa is C or S
FFLVSLSSLKTPAXXPKPVY

SEQ ID NO: 3124 - protein, 20 aa, Artificial Sequence
  Non-cyclic GFR-binding peptide
  MOD_RES (16)..(16): Xaa is C or S
FFLVSLSSHHVRSPQXKVSS

SEQ ID NO: 3125 - protein, 15 aa, Artificial Sequence
  Non-cyclic GFR-binding peptide
  MOD_RES (14)..(15): Xaa is C or S
FFLISLSSLDQPVXX

SEQ ID NO: 3126 - protein, 12 aa, Artificial Sequence
  Non-cyclic GFR-binding peptide
FFLMSLSSLETP

SEQ ID NO: 3127 - protein, 10 aa, Artificial Sequence
  Non-cyclic GFR-binding peptide
FFLISLSSLK

SEQ ID NO: 3128 - protein, 20 aa, Artificial Sequence
  Non-cyclic GFR-binding peptide
  MOD_RES (14)..(15): Xaa is C or S
FFLISLSSLAQPVXXPAASA

SEQ ID NO: 3129 - protein, 9 aa, Artificial Sequence
  Non-cyclic GFR-binding peptide
FFLMSLSSL

SEQ ID NO: 3130 - protein, 18 aa, Artificial Sequence
  Non-cyclic GFR-binding peptide
  MOD_RES (14)..(14): Xaa is C or S
FFLMSLSSEETPVXELGE

SEQ ID NO: 3131 - protein, 19 aa, Artificial Sequence
  Non-cyclic GFR-binding peptide
  MOD_RES (14)..(15): Xaa is C or S
FFLVSLSSLKTPAXXAKPV

SEQ ID NO: 3132 - protein, 12 aa, Artificial Sequence
  Non-cyclic GFR-binding peptide
FFLVSLSSHHVR

SEQ ID NO: 3133 - protein, 15 aa, Artificial Sequence
  Non-cyclic GFR-binding peptide
  MOD_RES (14)..(15): Xaa is C or S
FFLISLSSLDQSVXX

SEQ ID NO: 3134 - protein, 14 aa, Artificial Sequence
  Non-cyclic GFR-binding peptide
  MOD_RES (14)..(14): Xaa is C or S
FFLMSLSSMKTPTX

SEQ ID NO: 3135 - protein, 13 aa, Artificial Sequence
  Non-cyclic GFR-binding peptide
FFLMSLSSTKVPA

SEQ ID NO: 3136 - protein, 20 aa, Artificial Sequence
  Non-cyclic GFR-binding peptide
  MOD_RES (14)..(15): Xaa is C or S
FFLISLSSLRTPVXXTPPTS

SEQ ID NO: 3137 - protein, 11 aa, Artificial Sequence
  Non-cyclic GFR-binding peptide
FFLISLSSLDQ

SEQ ID NO: 3138 - protein, 18 aa, Artificial Sequence
  Non-cyclic GFR-binding peptide
  MOD_RES (14)..(15): Xaa is C or S
FFLVSLSSLKTPAXXAKP

SEQ ID NO: 3139 - protein, 19 aa, Artificial Sequence
  Non-cyclic GFR-binding peptide
  MOD_RES (14)..(15): Xaa is C or S
FFLVSLSSLKTPVXXAKGV

SEQ ID NO: 3140 - protein, 16 aa, Artificial Sequence
  Non-cyclic GFR-binding peptide
  MOD_RES (14)..(15): Xaa is C or S
FFLMSLSSTKVPAXXT

SEQ ID NO: 3141 - protein, 18 aa, Artificial Sequence
  Non-cyclic GFR-binding peptide
  MOD_RES (14)..(14): Xaa is C or S
FFLVSLSSLKTPAXTPKT

SEQ ID NO: 3142 - protein, 12 aa, Artificial Sequence
  Non-cyclic GFR-binding peptide
FFLISLSSLDQS

SEQ ID NO: 3143 - protein, 20 aa, Artificial Sequence
  Non-cyclic GFR-binding peptide
  MOD_RES (14)..(14): Xaa is C or S
FFLMSLSSEETPVXELGEDN

SEQ ID NO: 3144 - protein, 10 aa, Artificial Sequence
  Non-cyclic GFR-binding peptide
FFLISLSSLR

SEQ ID NO: 3145 - protein, 17 aa, Artificial Sequence
  Non-cyclic GFR-binding peptide
  MOD_RES (16)..(16): Xaa is C or S
FFLVSLSSHHVRSPQXK

SEQ ID NO: 3146 - protein, 20 aa, Artificial Sequence
  Non-cyclic GFR-binding peptide
  MOD_RES (14)..(15): Xaa is C or S
FFLMSLSSLETPVXXAKPIS

SEQ ID NO: 3147 - protein, 13 aa, Artificial Sequence
  Non-cyclic GFR-binding peptide
FFLISLSSLAQPV

SEQ ID NO: 3148 - protein, 16 aa, Artificial Sequence
  Non-cyclic GFR-binding peptide
  MOD_RES (14)..(15): Xaa is C or S
FFLISLSSLDQPVXXP

SEQ ID NO: 3149 - protein, 15 aa, Artificial Sequence
  Non-cyclic GFR-binding peptide
  MOD_RES (14)..(15): Xaa is C or S
FFLISLSSLRAPVXX

SEQ ID NO: 3150 - protein, 11 aa, Artificial Sequence
  Non-cyclic GFR-binding peptide
FFLMSLSSLET

SEQ ID NO: 3151 - protein, 18 aa, Artificial Sequence
  Non-cyclic GFR-binding peptide
  MOD_RES (14)..(15): Xaa is C or S
FFLMSLSSMKTPTXXPGA

SEQ ID NO: 3152 - protein, 9 aa, Artificial Sequence
  Non-cyclic GFR-binding peptide
FFLMSLSSE

SEQ ID NO: 3153 - protein, 17 aa, Artificial Sequence
  Non-cyclic GFR-binding peptide
  MOD_RES (14)..(14): Xaa is C or S
FFLMSLSSEETPVXELG

SEQ ID NO: 3154 - protein, 11 aa, Artificial Sequence
  Non-cyclic GFR-binding peptide
FFLISLSSLRA

SEQ ID NO: 3155 - protein, 13 aa, Artificial Sequence
  Non-cyclic GFR-binding peptide
FFLISLSSLKTPV

SEQ ID NO: 3156 - protein, 13 aa, Artificial Sequence
  Non-cyclic GFR-binding peptide
FFLVSLSSLKTPA

SEQ ID NO: 3157 - protein, 15 aa, Artificial Sequence
  Non-cyclic GFR-binding peptide
  MOD_RES (14)..(15): Xaa is C or S
FFLMSLSSLETPVXX

SEQ ID NO: 3158 - protein, 16 aa, Artificial Sequence
  Non-cyclic GFR-binding peptide
  MOD_RES (14)..(15): Xaa is C or S
FFLMSLSSLETPVXXA

SEQ ID NO: 3159 - protein, 18 aa, Artificial Sequence
  Non-cyclic GFR-binding peptide
  MOD_RES (14)..(15): Xaa is C or S
FFLVSLSSLQTPAXXPKP

SEQ ID NO: 3160 - protein, 16 aa, Artificial Sequence
  Non-cyclic GFR-binding peptide
  MOD_RES (14)..(15): Xaa is C or S
FFLMSLSSMKTPTXXP

SEQ ID NO: 3161 - protein, 15 aa, Artificial Sequence
  Non-cyclic GFR-binding peptide
  MOD_RES (14)..(15): Xaa is C or S
FFLISLSSLRTPVXX

SEQ ID NO: 3162 - protein, 18 aa, Artificial Sequence
  Non-cyclic GFR-binding peptide
  MOD_RES (14)..(15): Xaa is C or S
FFLISLSSLRTPVXXTPP

SEQ ID NO: 3163 - protein, 13 aa, Artificial Sequence
  Non-cyclic GFR-binding peptide
FFLVSLSSLQTPA

SEQ ID NO: 3164 - protein, 16 aa, Artificial Sequence
  Non-cyclic GFR-binding peptide
  MOD_RES (14)..(14): Xaa is C or S
FFLVSLSSLKTPAXTP

SEQ ID NO: 3165 - protein, 15 aa, Artificial Sequence
  Non-cyclic GFR-binding peptide
  MOD_RES (14)..(15): Xaa is C or S
FFLVSLSSLKTPVXX

SEQ ID NO: 3166 - protein, 10 aa, Artificial Sequence
  Non-cyclic GFR-binding peptide
FFLMSLSSMK

SEQ ID NO: 3167 - protein, 20 aa, Artificial Sequence
  Non-cyclic GFR-binding peptide
  MOD_RES (14)..(15): Xaa is C or S
FFLMSLSSMKTPTXXPGASG

SEQ ID NO: 3168 - protein, 12 aa, Artificial Sequence
  Non-cyclic GFR-binding peptide
FFLVSLSSLQTP

SEQ ID NO: 3169 - protein, 16 aa, Artificial Sequence
  Non-cyclic GFR-binding peptide
  MOD_RES (14)..(15): Xaa is C or S
FFLISLSSLRAPVXXS

SEQ ID NO: 3170 - protein, 14 aa, Artificial Sequence
  Non-cyclic GFR-binding peptide
  MOD_RES (14)..(14): Xaa is C or S
FFLISLSSLDQPVX

SEQ ID NO: 3171 - protein, 19 aa, Artificial Sequence
  Non-cyclic GFR-binding peptide
  MOD_RES (14)..(15): Xaa is C or S
FFLVSLSSLQTPAXXPKPV

SEQ ID NO: 3172 - protein, 15 aa, Artificial Sequence
  Non-cyclic GFR-binding peptide
  MOD_RES (14)..(15): Xaa is C or S
FFLMSLSSTKVPAXX

SEQ ID NO: 3173 - protein, 16 aa, Artificial Sequence
  Non-cyclic GFR-binding peptide
  MOD_RES (14)..(14): Xaa is C or S
FFLMSLSSEETPVXEL

SEQ ID NO: 3174 - protein, 14 aa, Artificial Sequence
  Non-cyclic GFR-binding peptide
  MOD_RES (14)..(14): Xaa is C or S
FFLMSLSSLETPVX

SEQ ID NO: 3175 - protein, 14 aa, Artificial Sequence
  Non-cyclic GFR-binding peptide
  MOD_RES (14)..(14): Xaa is C or S
FFLVSLSSLQTPAX

SEQ ID NO: 3176 - protein, 14 aa, Artificial Sequence
  Non-cyclic GFR-binding peptide
  MOD_RES (14)..(14): Xaa is C or S
FFLISLSSLAQPVX

SEQ ID NO: 3177 - protein, 10 aa, Artificial Sequence
  Non-cyclic GFR-binding peptide
FFLVSLSSLK

SEQ ID NO: 3178 - protein, 16 aa, Artificial Sequence
  Non-cyclic GFR-binding peptide
  MOD_RES (14)..(15): Xaa is C or S
FFLISLSSLDQSVXXP

SEQ ID NO: 3179 - protein, 19 aa, Artificial Sequence
  Non-cyclic GFR-binding peptide
  MOD_RES (14)..(15): Xaa is C or S
FFLISLSSLDQPVXXPSAS

SEQ ID NO: 3180 - protein, 14 aa, Artificial Sequence
  Non-cyclic GFR-binding peptide
FFLVSLSSHHVRSP

SEQ ID NO: 3181 - protein, 18 aa, Artificial Sequence
  Non-cyclic GFR-binding peptide
  MOD_RES (14)..(15): Xaa is C or S
FFLISLSSLKTPVXXAKS

SEQ ID NO: 3182 - protein, 13 aa, Artificial Sequence
  Non-cyclic GFR-binding peptide
FFLVSLSSHHVRS

SEQ ID NO: 3183 - protein, 15 aa, Artificial Sequence
  Non-cyclic GFR-binding peptide
FFLVSLSSHHVRSPQ

SEQ ID NO: 3184 - protein, 16 aa, Artificial Sequence
  Non-cyclic GFR-binding peptide
  MOD_RES (14)..(15): Xaa is C or S
FFLISLSSLKTPVXXA

SEQ ID NO: 3185 - protein, 14 aa, Artificial Sequence
  Non-cyclic GFR-binding peptide
  MOD_RES (14)..(14): Xaa is C or S
FFLISLSSLKTPVX

SEQ ID NO: 3186 - protein, 13 aa, Artificial Sequence
  Non-cyclic GFR-binding peptide
FFLVSLSSLKTPV

SEQ ID NO: 3187 - protein, 17 aa, Artificial Sequence
  Non-cyclic GFR-binding peptide
  MOD_RES (14)..(15): Xaa is C or S
FFLVSLSSLQTPAXXPK

SEQ ID NO: 3188 - protein, 11 aa, Artificial Sequence
  Non-cyclic GFR-binding peptide
FFLVSLSSLQT

SEQ ID NO: 3189 - protein, 17 aa, Artificial Sequence
  Non-cyclic GFR-binding peptide
  MOD_RES (14)..(15): Xaa is C or S
FFLVSLSSLKTPAXXAK

SEQ ID NO: 3190 - protein, 13 aa, Artificial Sequence
  Non-cyclic GFR-binding peptide
FFLISLSSLRTPV

SEQ ID NO: 3191 - protein, 10 aa, Artificial Sequence
  Non-cyclic GFR-binding peptide
FFLMSLSSTK

SEQ ID NO: 3192 - protein, 15 aa, Artificial Sequence
  Non-cyclic GFR-binding peptide
  MOD_RES (14)..(15): Xaa is C or S
FFLMSLSSMKTPTXX

SEQ ID NO: 3193 - protein, 18 aa, Artificial Sequence
  Non-cyclic GFR-binding peptide
  MOD_RES (14)..(15): Xaa is C or S
FFLISLSSLAQPVXXPAA

SEQ ID NO: 3194 - protein, 12 aa, Artificial Sequence
  Non-cyclic GFR-binding peptide
FFLISLSSLDQP

SEQ ID NO: 3195 - protein, 12 aa, Artificial Sequence
  Non-cyclic GFR-binding peptide
FFLMSLSSEETP

SEQ ID NO: 3196 - protein, 13 aa, Artificial Sequence
  Non-cyclic GFR-binding peptide
FFLMSLSSMKTPT

SEQ ID NO: 3197 - protein, 20 aa, Artificial Sequence
  Non-cyclic GFR-binding peptide
  MOD_RES (14)..(15): Xaa is C or S
FFLMSLSSLETPVXXAKPIK

SEQ ID NO: 3198 - protein, 18 aa, Artificial Sequence
  Non-cyclic GFR-binding peptide
  MOD_RES (14)..(15): Xaa is C or S
FFLMSLSSTKVPAXXTSP

SEQ ID NO: 3199 - protein, 16 aa, Artificial Sequence
  Non-cyclic GFR-binding peptide
  MOD_RES (14)..(15): Xaa is C or S
FFLVSLSSLKTPVXXA

SEQ ID NO: 3200 - protein, 14 aa, Artificial Sequence
  Non-cyclic GFR-binding peptide
  MOD_RES (14)..(14): Xaa is C or S
FFLMSLSSEETPVX

SEQ ID NO: 3201 - protein, 16 aa, Artificial Sequence
  Non-cyclic GFR-binding peptide
  MOD_RES (14)..(15): Xaa is C or S
FFLVSLSSLKTPAXXP

SEQ ID NO: 3202 - protein, 17 aa, Artificial Sequence
  Non-cyclic GFR-binding peptide
  MOD_RES (14)..(15): Xaa is C or S
FFLMSLSSMKTPTXXPG

SEQ ID NO: 3203 - protein, 12 aa, Artificial Sequence
  Non-cyclic GFR-binding peptide
FFLISLSSLKTP

SEQ ID NO: 3204 - protein, 20 aa, Artificial Sequence
  Non-cyclic GFR-binding peptide
  MOD_RES (14)..(15): Xaa is C or S
FFLVSLSSLQTPAXXPKPVT

SEQ ID NO: 3205 - protein, 16 aa, Artificial Sequence
  Non-cyclic GFR-binding peptide
  MOD_RES (14)..(15): Xaa is C or S
FFLVSLSSLQTPAXXP

SEQ ID NO: 3206 - protein, 20 aa, Artificial Sequence
  Non-cyclic GFR-binding peptide
  MOD_RES (14)..(15): Xaa is C or S
FFLVSLSSLKTPVXXAKGVK

SEQ ID NO: 3207 - protein, 10 aa, Artificial Sequence
  Non-cyclic GFR-binding peptide
FFLMSLSSLE

SEQ ID NO: 3208 - protein, 16 aa, Artificial Sequence
  Non-cyclic GFR-binding peptide
  MOD_RES (16)..(16): Xaa is C or S
FFLVSLSSHHVRSPQX

SEQ ID NO: 3209 - protein, 18 aa, Artificial Sequence
  Non-cyclic GFR-binding peptide
  MOD_RES (14)..(15): Xaa is C or S
FFLISLSSLDQSVXXPSA

SEQ ID NO: 3210 - protein, 18 aa, Artificial Sequence
  Non-cyclic GFR-binding peptide
  MOD_RES (14)..(15): Xaa is C or S
FFLISLSSLDQPVXXPSA

SEQ ID NO: 3211 - protein, 14 aa, Artificial Sequence
  Non-cyclic GFR-binding peptide
  MOD_RES (14)..(14): Xaa is C or S
FFLVSLSSLKTPVX

SEQ ID NO: 3212 - protein, 15 aa, Artificial Sequence
  Non-cyclic GFR-binding peptide
  MOD_RES (14)..(15): Xaa is C or S
FFLISLSSLAQPVXX

SEQ ID NO: 3213 - protein, 17 aa, Artificial Sequence
  Non-cyclic GFR-binding peptide
  MOD_RES (14)..(15): Xaa is C or S
FFLISLSSLDQSVXXPS

SEQ ID NO: 3214 - protein, 11 aa, Artificial Sequence
  Non-cyclic GFR-binding peptide
FFLMSLSSMKT

SEQ ID NO: 3215 - protein, 9 aa, Artificial Sequence
  Non-cyclic GFR-binding peptide
FFLISLSSL

SEQ ID NO: 3216 - protein, 20 aa, Artificial Sequence
  Non-cyclic GFR-binding peptide
  MOD_RES (14)..(15): Xaa is C or S
FFLMSLSSTKVPAXXTSPVR

SEQ ID NO: 3217 - protein, 13 aa, Artificial Sequence
  Non-cyclic GFR-binding peptide
FFLISLSSLDQSV

SEQ ID NO: 3218 - protein, 17 aa, Artificial Sequence
  Non-cyclic GFR-binding peptide
  MOD_RES (14)..(14): Xaa is C or S
FFLVSLSSLKTPAXTPK

SEQ ID NO: 3219 - protein, 18 aa, Artificial Sequence
  Non-cyclic GFR-binding peptide
  MOD_RES (16)..(16): Xaa is C or S
FFLVSLSSHHVRSPQXKV

SEQ ID NO: 3220 - protein, 12 aa, Artificial Sequence
  Non-cyclic GFR-binding peptide
FFLISLSSLAQP

SEQ ID NO: 3221 - protein, 19 aa, Artificial Sequence
  Non-cyclic GFR-binding peptide
  MOD_RES (14)..(14): Xaa is C or S
FFLVSLSSLKTPAXTPKTV

SEQ ID NO: 3222 - protein, 11 aa, Artificial Sequence
  Non-cyclic GFR-binding peptide
FFLISLSSLAQ

SEQ ID NO: 3223 - protein, 16 aa, Artificial Sequence
  Non-cyclic GFR-binding peptide
  MOD_RES (14)..(15): Xaa is C or S
FFLISLSSLRTPVXXT

SEQ ID NO: 3224 - protein, 18 aa, Artificial Sequence
  Non-cyclic GFR-binding peptide
  MOD_RES (14)..(15): Xaa is C or S
FFLISLSSLRAPVXXSAP

SEQ ID NO: 3225 - protein, 18 aa, Artificial Sequence
  Non-cyclic GFR-binding peptide
  MOD_RES (14)..(15): Xaa is C or S
FFLMSLSSLETPVXXAKP

SEQ ID NO: 3226 - protein, 11 aa, Artificial Sequence
  Non-cyclic GFR-binding peptide
FFLMSLSSTKV

SEQ ID NO: 3227 - protein, 17 aa, Artificial Sequence
  Non-cyclic GFR-binding peptide
  MOD_RES (14)..(15): Xaa is C or S
FFLISLSSLRAPVXXSA

SEQ ID NO: 3228 - protein, 19 aa, Artificial Sequence
  Non-cyclic GFR-binding peptide
  MOD_RES (14)..(15): Xaa is C or S
FFLISLSSLAQPVXXPAAS

SEQ ID NO: 3229 - protein, 17 aa, Artificial Sequence
  Non-cyclic GFR-binding peptide
  MOD_RES (14)..(15): Xaa is C or S
FFLISLSSLAQPVXXPA

SEQ ID NO: 3230 - protein, 12 aa, Artificial Sequence
  Non-cyclic GFR-binding peptide
FFLMSLSSTKVP

SEQ ID NO: 3231 - protein, 17 aa, Artificial Sequence
  Non-cyclic GFR-binding peptide
  MOD_RES (14)..(15): Xaa is C or S
FFLISLSSLRTPVXXTP

SEQ ID NO: 3232 - protein, 19 aa, Artificial Sequence
  Non-cyclic GFR-binding peptide
  MOD_RES (14)..(15): Xaa is C or S
FFLMSLSSLETPVXXAKPI

SEQ ID NO: 3233 - protein, 15 aa, Artificial Sequence
  Non-cyclic GFR-binding peptide
  MOD_RES (14)..(15): Xaa is C or S
FFLVSLSSLQTPAXX

SEQ ID NO: 3234 - protein, 19 aa, Artificial Sequence
  Non-cyclic GFR-binding peptide
  MOD_RES (14)..(15): Xaa is C or S
FFLMSLSSTKVPAXXTSPV

SEQ ID NO: 3235 - protein, 10 aa, Artificial Sequence
  Non-cyclic GFR-binding peptide
FFLVSLSSHH

SEQ ID NO: 3236 - protein, 17 aa, Artificial Sequence
  Non-cyclic GFR-binding peptide
  MOD_RES (14)..(15): Xaa is C or S
FFLMSLSSTKVPAXXTS

SEQ ID NO: 3237 - protein, 11 aa, Artificial Sequence
  Non-cyclic GFR-binding peptide
FFLMSLSSEET

SEQ ID NO: 3238 - protein, 13 aa, Artificial Sequence
  Non-cyclic GFR-binding peptide
FFLISLSSLRAPV

SEQ ID NO: 3239 - protein, 15 aa, Artificial Sequence
  Non-cyclic GFR-binding peptide
  MOD_RES (14)..(15): Xaa is C or S
FFLISLSSLKTPVXX

SEQ ID NO: 3240 - protein, 14 aa, Artificial Sequence
  Non-cyclic GFR-binding peptide
  MOD_RES (14)..(14): Xaa is C or S
FFLISLSSLRTPVX

SEQ ID NO: 3241 - protein, 20 aa, Artificial Sequence
  Non-cyclic GFR-binding peptide
  MOD_RES (14)..(15): Xaa is C or S
FFLISLSSLKTPVXXAKSAK

SEQ ID NO: 3242 - protein, 10 aa, Artificial Sequence
  Non-cyclic GFR-binding peptide
FFLISLSSLA

SEQ ID NO: 3243 - protein, 12 aa, Artificial Sequence
  Non-cyclic GFR-binding peptide
FFLVSLSSLKTP

SEQ ID NO: 3244 - protein, 20 aa, Artificial Sequence
  Non-cyclic GFR-binding peptide
  MOD_RES (14)..(15): Xaa is C or S
FFLVSLSSLKTPAXXPKPVH

SEQ ID NO: 3245 - protein, 12 aa, Artificial Sequence
  Non-cyclic GFR-binding peptide
FFLISLSSLRTP

SEQ ID NO: 3246 - protein, 15 aa, Artificial Sequence
  Non-cyclic GFR-binding peptide
  MOD_RES (14)..(15): Xaa is C or S
FFLVSLSSLKTPAXX

SEQ ID NO: 3247 - protein, 14 aa, Artificial Sequence
  Non-cyclic GFR-binding peptide
  MOD_RES (14)..(14): Xaa is C or S
FFLISLSSLDQSVX

SEQ ID NO: 3248 - protein, 19 aa, Artificial Sequence
  Non-cyclic GFR-binding peptide
  MOD_RES (14)..(15): Xaa is C or S
FFLISLSSLRAPVXXSAPA

SEQ ID NO: 3249 - protein, 13 aa, Artificial Sequence
  Non-cyclic GFR-binding peptide
FFLMSLSSLETPV

SEQ ID NO: 3250 - protein, 18 aa, Artificial Sequence
  Non-cyclic GFR-binding peptide
  MOD_RES (14)..(15): Xaa is C or S
FFLVSLSSLKTPAXXPKP

SEQ ID NO: 3251 - protein, 16 aa, Artificial Sequence
  Non-cyclic GFR-binding peptide
  MOD_RES (14)..(15): Xaa is C or S
FFLVSLSSLKTPAXXA

SEQ ID NO: 3252 - protein, 19 aa, Artificial Sequence
  Non-cyclic GFR-binding peptide
  MOD_RES (14)..(15): Xaa is C or S
FFLISLSSLDQSVXXPSAS

SEQ ID NO: 3253 - protein, 9 aa, Artificial Sequence
  Non-cyclic GFR-binding peptide
FFLVSLSSL

SEQ ID NO: 3254 - protein, 14 aa, Artificial Sequence
  Non-cyclic GFR-binding peptide
  MOD_RES (14)..(14): Xaa is C or S
FFLISLSSLRAPVX

SEQ ID NO: 3255 - protein, 10 aa, Artificial Sequence
  Non-cyclic GFR-binding peptide
FFLISLSSLD

SEQ ID NO: 3256 - protein, 17 aa, Artificial Sequence
  Non-cyclic GFR-binding peptide
  MOD_RES (14)..(15): Xaa is C or S
FFLVSLSSLKTPVXXAK

SEQ ID NO: 3257 - protein, 19 aa, Artificial Sequence
  Non-cyclic GFR-binding peptide
  MOD_RES (14)..(15): Xaa is C or S
FFLVSLSSLKTPAXXPKPV

SEQ ID NO: 3258 - protein, 19 aa, Artificial Sequence
  Non-cyclic GFR-binding peptide
  MOD_RES (14)..(14): Xaa is C or S
FFLMSLSSEETPVXELGED

SEQ ID NO: 3259 - protein, 14 aa, Artificial Sequence
  Non-cyclic GFR-binding peptide
  MOD_RES (14)..(14): Xaa is C or S
FFLVSLSSLKTPAX

SEQ ID NO: 3260 - protein, 11 aa, Artificial Sequence
  Non-cyclic GFR-binding peptide
FFLISLSSLKT

SEQ ID NO: 3261 - protein, 18 aa, Artificial Sequence
  Non-cyclic GFR-binding peptide
  MOD_RES (14)..(15): Xaa is C or S
FFLVSLSSLKTPVXXAKG

SEQ ID NO: 3262 - protein, 20 aa, Artificial Sequence
  Non-cyclic GFR-binding peptide
  MOD_RES (14)..(15): Xaa is C or S
FFLISLSSLDQSVXXPSASA

SEQ ID NO: 3263 - protein, 12 aa, Artificial Sequence
  Non-cyclic GFR-binding peptide
FFLMSLSSMKTP

SEQ ID NO: 3264 - protein, 19 aa, Artificial Sequence
  Non-cyclic GFR-binding peptide
  MOD_RES (16)..(16): Xaa is C or S
FFLVSLSSHHVRSPQXKVS

SEQ ID NO: 3265 - protein, 9 aa, Artificial Sequence
  Non-cyclic GFR-binding peptide
FFLMSLSST

SEQ ID NO: 3266 - protein, 13 aa, Artificial Sequence
  Non-cyclic GFR-binding peptide
FFLMSLSSEETPV

SEQ ID NO: 3267 - protein, 19 aa, Artificial Sequence
  Non-cyclic GFR-binding peptide
  MOD_RES (14)..(15): Xaa is C or S
FFLMSLSSMKTPTXXPGAS

SEQ ID NO: 3268 - protein, 17 aa, Artificial Sequence
  Non-cyclic GFR-binding peptide
  MOD_RES (14)..(15): Xaa is C or S
FFLMSLSSLETPVXXAK

SEQ ID NO: 3269 - protein, 20 aa, Artificial Sequence
  Non-cyclic GFR-binding peptide
  MOD_RES (14)..(15): Xaa is C or S
FFLISLSSLDQPVXXPSASA

SEQ ID NO: 3270 - protein, 11 aa, Artificial Sequence
  Non-cyclic GFR-binding peptide
FFLVSLSSLKT

SEQ ID NO: 3271 - protein, 16 aa, Artificial Sequence
  Non-cyclic GFR-binding peptide
  MOD_RES (14)..(15): Xaa is C or S
FFLISLSSLAQPVXXP

SEQ ID NO: 3272 - protein, 17 aa, Artificial Sequence
  Non-cyclic GFR-binding peptide
  MOD_RES (14)..(15): Xaa is C or S
FFLVSLSSLKTPAXXPK

SEQ ID NO: 3273 - protein, 10 aa, Artificial Sequence
  Non-cyclic GFR-binding peptide
FFLVSLSSLQ

SEQ ID NO: 3274 - protein, 20 aa, Artificial Sequence
  Non-cyclic GFR-binding peptide
  MOD_RES (14)..(15): Xaa is C or S
FFLVSLSSLKTPAXXAKPVA

SEQ ID NO: 3275 - protein, 19 aa, Artificial Sequence
  Non-cyclic GFR-binding peptide
  MOD_RES (14)..(15): Xaa is C or S
FFLISLSSLRTPVXXTPPT

SEQ ID NO: 3276 - protein, 17 aa, Artificial Sequence
  Non-cyclic GFR-binding peptide
  MOD_RES (14)..(15): Xaa is C or S
FFLISLSSLKTPVXXAK

SEQ ID NO: 3277 - protein, 13 aa, Artificial Sequence
  Non-cyclic GFR-binding peptide
FFLISLSSLDQPV

SEQ ID NO: 3278 - protein, 10 aa, Artificial Sequence
  Non-cyclic GFR-binding peptide
FFLMSLSSEE

SEQ ID NO: 3279 - protein, 19 aa, Artificial Sequence
  Non-cyclic GFR-binding peptide
  MOD_RES (14)..(15): Xaa is C or S
FFLISLSSLKTPVXXAKSA

SEQ ID NO: 3280 - protein, 15 aa, Artificial Sequence
  Non-cyclic GFR-binding peptide
  MOD_RES (14)..(14): Xaa is C or S
FFLMSLSSEETPVXE

SEQ ID NO: 3281 - protein, 20 aa, Artificial Sequence
  Non-cyclic GFR-binding peptide
  MOD_RES (14)..(15): Xaa is C or S
FFLISLSSLRAPVXXSAPAA

SEQ ID NO: 3282 - protein, 9 aa, Artificial Sequence
  Non-cyclic GFR-binding peptide
FFLMSLSSM

SEQ ID NO: 3283 - protein, 20 aa, Artificial Sequence
  Non-cyclic GFR-binding peptide
  MOD_RES (14)..(14): Xaa is C or S
FFLVSLSSLKTPAXTPKTVH

SEQ ID NO: 3284 - protein, 11 aa, Artificial Sequence
  Non-cyclic GFR-binding peptide
FFLISLSSLRT

SEQ ID NO: 3285 - protein, 9 aa, Artificial Sequence
  Non-cyclic GFR-binding peptide
FFLVSLSSH

SEQ ID NO: 3286 - protein, 17 aa, Artificial Sequence
  Non-cyclic GFR-binding peptide
  MOD_RES (14)..(15): Xaa is C or S
FFLISLSSLDQPVXXPS

SEQ ID NO: 3287 - protein, 14 aa, Artificial Sequence
  Non-cyclic GFR-binding peptide
  MOD_RES (14)..(14): Xaa is C or S
FFLMSLSSTKVPAX

SEQ ID NO: 3288 - protein, 11 aa, Artificial Sequence
  Non-cyclic GFR-binding peptide
FFLVSLSSHHV

SEQ ID NO: 3289 - protein, 12 aa, Artificial Sequence
  Non-cyclic GFR-binding peptide
PARLSSLSILFF

SEQ ID NO: 3290 - protein, 15 aa, Artificial Sequence
  Non-cyclic GFR-binding peptide
  MOD_RES (2)..(2): Xaa is C or S
TXAPTKLSSLSVLFF

SEQ ID NO: 3291 - protein, 20 aa, Artificial Sequence
  Non-cyclic GFR-binding peptide
  MOD_RES (6)..(7): Xaa is C or S
YVPKPXXAPTKLSSLSVLFF

SEQ ID NO: 3292 - protein, 20 aa, Artificial Sequence
  Non-cyclic GFR-binding peptide
  MOD_RES (5)..(5): Xaa is C or S
SSVKXQPSRVHHSSLSVLFF

SEQ ID NO: 3293 - protein, 15 aa, Artificial Sequence
  Non-cyclic GFR-binding peptide
  MOD_RES (1)..(2): Xaa is C or S
XXVPQDLSSLSILFF

SEQ ID NO: 3294 - protein, 12 aa, Artificial Sequence
  Non-cyclic GFR-binding peptide
PTELSSLSMLFF

SEQ ID NO: 3295 - protein, 10 aa, Artificial Sequence
  Non-cyclic GFR-binding peptide
KLSSLSILFF

SEQ ID NO: 3296 - protein, 20 aa, Artificial Sequence
  Non-cyclic GFR-binding peptide
  MOD_RES (6)..(7): Xaa is C or S
ASAAPXXVPQALSSLSILFF

SEQ ID NO: 3297 - protein, 9 aa, Artificial Sequence
  Non-cyclic GFR-binding peptide
LSSLSMLFF

SEQ ID NO: 3298 - protein, 18 aa, Artificial Sequence
  Non-cyclic GFR-binding peptide
  MOD_RES (5)..(5): Xaa is C or S
EGLEXVPTEESSLSMLFF

SEQ ID NO: 3299 - protein, 19 aa, Artificial Sequence
  Non-cyclic GFR-binding peptide
  MOD_RES (5)..(6): Xaa is C or S
VPKAXXAPTKLSSLSVLFF

SEQ ID NO: 3300 - protein, 12 aa, Artificial Sequence
  Non-cyclic GFR-binding peptide
RVHHSSLSVLFF

SEQ ID NO: 3301 - protein, 15 aa, Artificial Sequence
  Non-cyclic GFR-binding peptide
  MOD_RES (1)..(2): Xaa is C or S
XXVSQDLSSLSILFF

SEQ ID NO: 3302 - protein, 14 aa, Artificial Sequence
  Non-cyclic GFR-binding peptide
  MOD_RES (1)..(1): Xaa is C or S
XTPTKMSSLSMLFF

SEQ ID NO: 3303 - protein, 13 aa, Artificial Sequence
  Non-cyclic GFR-binding peptide
APVKTSSLSMLFF

SEQ ID NO: 3304 - protein, 20 aa, Artificial Sequence
  Non-cyclic GFR-binding peptide
  MOD_RES (6)..(7): Xaa is C or S
STPPTXXVPTRLSSLSILFF

SEQ ID NO: 3305 - protein, 11 aa, Artificial Sequence
  Non-cyclic GFR-binding peptide
QDLSSLSILFF

SEQ ID NO: 3306 - protein, 18 aa, Artificial Sequence
  Non-cyclic GFR-binding peptide
  MOD_RES (4)..(5): Xaa is C or S
PKAXXAPTKLSSLSVLFF

SEQ ID NO: 3307 - protein, 19 aa, Artificial Sequence
  Non-cyclic GFR-binding peptide
  MOD_RES (5)..(6): Xaa is C or S
VGKAXXVPTKLSSLSVLFF

SEQ ID NO: 3308 - protein, 16 aa, Artificial Sequence
  Non-cyclic GFR-binding peptide
  MOD_RES (2)..(3): Xaa is C or S
TXXAPVKTSSLSMLFF

SEQ ID NO: 3309 - protein, 18 aa, Artificial Sequence
  Non-cyclic GFR-binding peptide
  MOD_RES (5)..(5): Xaa is C or S
TKPTXAPTKLSSLSVLFF

SEQ ID NO: 3310 - protein, 12 aa, Artificial Sequence
  Non-cyclic GFR-binding peptide
SQDLSSLSILFF

SEQ ID NO: 3311 - protein, 20 aa, Artificial Sequence
  Non-cyclic GFR-binding peptide
  MOD_RES (7)..(7): Xaa is C or S
NDEGLEXVPTEESSLSMLFF

SEQ ID NO: 3312 - protein, 10 aa, Artificial Sequence
  Non-cyclic GFR-binding peptide
RLSSLSILFF

SEQ ID NO: 3313 - protein, 17 aa, Artificial Sequence
  Non-cyclic GFR-binding peptide
  MOD_RES (2)..(2): Xaa is C or S
KXQPSRVHHSSLSVLFF

SEQ ID NO: 3314 - protein, 20 aa, Artificial Sequence
  Non-cyclic GFR-binding peptide
  MOD_RES (6)..(7): Xaa is C or S
SIPKAXXVPTELSSLSMLFF

SEQ ID NO: 3315 - protein, 13 aa, Artificial Sequence
  Non-cyclic GFR-binding peptide
VPQALSSLSILFF

SEQ ID NO: 3316 - protein, 16 aa, Artificial Sequence
  Non-cyclic GFR-binding peptide
  MOD_RES (2)..(3): Xaa is C or S
PXXVPQDLSSLSILFF

SEQ ID NO: 3317 - protein, 15 aa, Artificial Sequence
  Non-cyclic GFR-binding peptide
  MOD_RES (1)..(2): Xaa is C or S
XXVPARLSSLSILFF

SEQ ID NO: 3318 - protein, 11 aa, Artificial Sequence
  Non-cyclic GFR-binding peptide
TELSSLSMLFF

SEQ ID NO: 3319 - protein, 18 aa, Artificial Sequence
  Non-cyclic GFR-binding peptide
  MOD_RES (4)..(5): Xaa is C or S
AGPXXTPTKMSSLSMLFF

SEQ ID NO: 3320 - protein, 9 aa, Artificial Sequence
  Non-cyclic GFR-binding peptide
ESSLSMLFF

SEQ ID NO: 3321 - protein, 17 aa, Artificial Sequence
  Non-cyclic GFR-binding peptide
  MOD_RES (4)..(4): Xaa is C or S
GLEXVPTEESSLSMLFF

SEQ ID NO: 3322 - protein, 11 aa, Artificial Sequence
  Non-cyclic GFR-binding peptide
ARLSSLSILFF

SEQ ID NO: 3323 - protein, 13 aa, Artificial Sequence
  Non-cyclic GFR-binding peptide
VPTKLSSLSILFF

SEQ ID NO: 3324 - protein, 13 aa, Artificial Sequence
  Non-cyclic GFR-binding peptide
APTKLSSLSVLFF

SEQ ID NO: 3325 - protein, 15 aa, Artificial Sequence
  Non-cyclic GFR-binding peptide
  MOD_RES (1)..(2): Xaa is C or S
XXVPTELSSLSMLFF

SEQ ID NO: 3326 - protein, 16 aa, Artificial Sequence
  Non-cyclic GFR-binding peptide
  MOD_RES (2)..(3): Xaa is C or S
AXXVPTELSSLSMLFF

SEQ ID NO: 3327 - protein, 18 aa, Artificial Sequence
  Non-cyclic GFR-binding peptide
  MOD_RES (4)..(5): Xaa is C or S
PKPXXAPTQLSSLSVLFF

SEQ ID NO: 3328 - protein, 16 aa, Artificial Sequence
  Non-cyclic GFR-binding peptide
  MOD_RES (2)..(3): Xaa is C or S
PXXTPTKMSSLSMLFF

SEQ ID NO: 3329 - protein, 15 aa, Artificial Sequence
  Non-cyclic GFR-binding peptide
  MOD_RES (1)..(2): Xaa is C or S
XXVPTRLSSLSILFF

SEQ ID NO: 3330 - protein, 18 aa, Artificial Sequence
  Non-cyclic GFR-binding peptide
  MOD_RES (4)..(5): Xaa is C or S
PPTXXVPTRLSSLSILFF

SEQ ID NO: 3331 - protein, 13 aa, Artificial Sequence
  Non-cyclic GFR-binding peptide
APTQLSSLSVLFF

SEQ ID NO: 3332 - protein, 16 aa, Artificial Sequence
  Non-cyclic GFR-binding peptide
  MOD_RES (3)..(3): Xaa is C or S
PTXAPTKLSSLSVLFF

SEQ ID NO: 3333 - protein, 15 aa, Artificial Sequence
  Non-cyclic GFR-binding peptide
  MOD_RES (1)..(2): Xaa is C or S
XXVPTKLSSLSVLFF

SEQ ID NO: 3334 - protein, 10 aa, Artificial Sequence
  Non-cyclic GFR-binding peptide
KMSSLSMLFF

SEQ ID NO: 3335 - protein, 20 aa, Artificial Sequence
  Non-cyclic GFR-binding peptide
  MOD_RES (6)..(7): Xaa is C or S
GSAGPXXTPTKMSSLSMLFF

SEQ ID NO: 3336 - protein, 12 aa, Artificial Sequence
  Non-cyclic GFR-binding peptide
PTQLSSLSVLFF

SEQ ID NO: 3337 - protein, 16 aa, Artificial Sequence
  Non-cyclic GFR-binding peptide
  MOD_RES (2)..(3): Xaa is C or S
SXXVPARLSSLSILFF

SEQ ID NO: 3338 - protein, 14 aa, Artificial Sequence
  Non-cyclic GFR-binding peptide
  MOD_RES (1)..(1): Xaa is C or S
XVPQDLSSLSILFF

SEQ ID NO: 3339 - protein, 19 aa, Artificial Sequence
  Non-cyclic GFR-binding peptide
  MOD_RES (5)..(6): Xaa is C or S
VPKPXXAPTQLSSLSVLFF

SEQ ID NO: 3340 - protein, 15 aa, Artificial Sequence
  Non-cyclic GFR-binding peptide
  MOD_RES (1)..(2): Xaa is C or S
XXAPVKTSSLSMLFF

SEQ ID NO: 3341 - protein, 16 aa, Artificial Sequence
  Non-cyclic GFR-binding peptide
  MOD_RES (3)..(3): Xaa is C or S
LEXVPTEESSLSMLFF

SEQ ID NO: 3342 - protein, 14 aa, Artificial Sequence
  Non-cyclic GFR-binding peptide
  MOD_RES (1)..(1): Xaa is C or S
XVPTELSSLSMLFF

SEQ ID NO: 3343 - protein, 14 aa, Artificial Sequence
  Non-cyclic GFR-binding peptide
  MOD_RES (1)..(1): Xaa is C or S
XAPTQLSSLSVLFF

SEQ ID NO: 3344 - protein, 14 aa, Artificial Sequence
  Non-cyclic GFR-binding peptide
  MOD_RES (1)..(1): Xaa is C or S
XVPQALSSLSILFF

SEQ ID NO: 3345 - protein, 10 aa, Artificial Sequence
  Non-cyclic GFR-binding peptide
KLSSLSVLFF

SEQ ID NO: 3346 - protein, 16 aa, Artificial Sequence
  Non-cyclic GFR-binding peptide
  MOD_RES (2)..(3): Xaa is C or S
PXXVSQDLSSLSILFF

SEQ ID NO: 3347 - protein, 19 aa, Artificial Sequence
  Non-cyclic GFR-binding peptide
  MOD_RES (5)..(6): Xaa is C or S
SASPXXVPQDLSSLSILFF

SEQ ID NO: 3348 - protein, 14 aa, Artificial Sequence
  Non-cyclic GFR-binding peptide
PSRVHHSSLSVLFF

SEQ ID NO: 3349 - protein, 18 aa, Artificial Sequence
  Non-cyclic GFR-binding peptide
  MOD_RES (4)..(5): Xaa is C or S
SKAXXVPTKLSSLSILFF

SEQ ID NO: 3350 - protein, 13 aa, Artificial Sequence
  Non-cyclic GFR-binding peptide
SRVHHSSLSVLFF

SEQ ID NO: 3351 - protein, 15 aa, Artificial Sequence
  Non-cyclic GFR-binding peptide
QPSRVHHSSLSVLFF

SEQ ID NO: 3352 - protein, 16 aa, Artificial Sequence
  Non-cyclic GFR-binding peptide
  MOD_RES (2)..(3): Xaa is C or S
AXXVPTKLSSLSILFF

SEQ ID NO: 3353 - protein, 14 aa, Artificial Sequence
  Non-cyclic GFR-binding peptide
  MOD_RES (1)..(1): Xaa is C or S
XVPTKLSSLSILFF

SEQ ID NO: 3354 - protein, 13 aa, Artificial Sequence
  Non-cyclic GFR-binding peptide
VPTKLSSLSVLFF

SEQ ID NO: 3355 - protein, 17 aa, Artificial Sequence
  Non-cyclic GFR-binding peptide
  MOD_RES (3)..(4): Xaa is C or S
KPXXAPTQLSSLSVLFF

SEQ ID NO: 3356 - protein, 11 aa, Artificial Sequence
  Non-cyclic GFR-binding peptide
TQLSSLSVLFF

SEQ ID NO: 3357 - protein, 17 aa, Artificial Sequence
  Non-cyclic GFR-binding peptide
  MOD_RES (3)..(4): Xaa is C or S
KAXXAPTKLSSLSVLFF

SEQ ID NO: 3358 - protein, 13 aa, Artificial Sequence
  Non-cyclic GFR-binding peptide
VPTRLSSLSILFF

SEQ ID NO: 3359 - protein, 10 aa, Artificial Sequence
  Non-cyclic GFR-binding peptide
KTSSLSMLFF

SEQ ID NO: 3360 - protein, 15 aa, Artificial Sequence
  Non-cyclic GFR-binding peptide
  MOD_RES (1)..(2): Xaa is C or S
XXTPTKMSSLSMLFF

SEQ ID NO: 3361 - protein, 18 aa, Artificial Sequence
  Non-cyclic GFR-binding peptide
  MOD_RES (4)..(5): Xaa is C or S
AAPXXVPQALSSLSILFF

SEQ ID NO: 3362 - protein, 12 aa, Artificial Sequence
  Non-cyclic GFR-binding peptide
PQDLSSLSILFF

SEQ ID NO: 3363 - protein, 12 aa, Artificial Sequence
  Non-cyclic GFR-binding peptide
PTEESSLSMLFF

SEQ ID NO: 3364 - protein, 13 aa, Artificial Sequence
  Non-cyclic GFR-binding peptide
TPTKMSSLSMLFF

SEQ ID NO: 3365 - protein, 20 aa, Artificial Sequence
  Non-cyclic GFR-binding peptide
  MOD_RES (6)..(7): Xaa is C or S
KIPKAXXVPTELSSLSMLFF

SEQ ID NO: 3366 - protein, 18 aa, Artificial Sequence
  Non-cyclic GFR-binding peptide
  MOD_RES (4)..(5): Xaa is C or S
PSTXXAPVKTSSLSMLFF

SEQ ID NO: 3367 - protein, 16 aa, Artificial Sequence
  Non-cyclic GFR-binding peptide
  MOD_RES (2)..(3): Xaa is C or S
AXXVPTKLSSLSVLFF

SEQ ID NO: 3368 - protein, 14 aa, Artificial Sequence
  Non-cyclic GFR-binding peptide
  MOD_RES (1)..(1): Xaa is C or S
XVPTEESSLSMLFF

SEQ ID NO: 3369 - protein, 16 aa, Artificial Sequence
  Non-cyclic GFR-binding peptide
  MOD_RES (2)..(3): Xaa is C or S
PXXAPTKLSSLSVLFF

SEQ ID NO: 3370 - protein, 17 aa, Artificial Sequence
  Non-cyclic GFR-binding peptide
  MOD_RES (3)..(4): Xaa is C or S
GPXXTPTKMSSLSMLFF

SEQ ID NO: 3371 - protein, 12 aa, Artificial Sequence
  Non-cyclic GFR-binding peptide
PTKLSSLSILFF

SEQ ID NO: 3372 - protein, 20 aa, Artificial Sequence
  Non-cyclic GFR-binding peptide
  MOD_RES (6)..(7): Xaa is C or S
TVPKPXXAPTQLSSLSVLFF

SEQ ID NO: 3373 - protein, 16 aa, Artificial Sequence
  Non-cyclic GFR-binding peptide
  MOD_RES (2)..(3): Xaa is C or S
PXXAPTQLSSLSVLFF

SEQ ID NO: 3374 - protein, 20 aa, Artificial Sequence
  Non-cyclic GFR-binding peptide
  MOD_RES (6)..(7): Xaa is C or S
KVGKAXXVPTKLSSLSVLFF

SEQ ID NO: 3375 - protein, 10 aa, Artificial Sequence
  Non-cyclic GFR-binding peptide
ELSSLSMLFF

SEQ ID NO: 3376 - protein, 16 aa, Artificial Sequence
  Non-cyclic GFR-binding peptide
  MOD_RES (1)..(1): Xaa is C or S
XQPSRVHHSSLSVLFF

SEQ ID NO: 3377 - protein, 18 aa, Artificial Sequence
  Non-cyclic GFR-binding peptide
  MOD_RES (4)..(5): Xaa is C or S
ASPXXVSQDLSSLSILFF

SEQ ID NO: 3378 - protein, 18 aa, Artificial Sequence
  Non-cyclic GFR-binding peptide
  MOD_RES (4)..(5): Xaa is C or S
ASPXXVPQDLSSLSILFF

SEQ ID NO: 3379 - protein, 14 aa, Artificial Sequence
  Non-cyclic GFR-binding peptide
  MOD_RES (1)..(1): Xaa is C or S
XVPTKLSSLSVLFF

SEQ ID NO: 3380 - protein, 15 aa, Artificial Sequence
  Non-cyclic GFR-binding peptide
  MOD_RES (1)..(2): Xaa is C or S
XXVPQALSSLSILFF

SEQ ID NO: 3381 - protein, 17 aa, Artificial Sequence
  Non-cyclic GFR-binding peptide
  MOD_RES (3)..(4): Xaa is C or S
SPXXVSQDLSSLSILFF

SEQ ID NO: 3382 - protein, 11 aa, Artificial Sequence
  Non-cyclic GFR-binding peptide
TKMSSLSMLFF

SEQ ID NO: 3383 - protein, 9 aa, Artificial Sequence
  Non-cyclic GFR-binding peptide
LSSLSILFF

SEQ ID NO: 3384 - protein, 20 aa, Artificial Sequence
  Non-cyclic GFR-binding peptide
  MOD_RES (6)..(7): Xaa is C or S
RVPSTXXAPVKTSSLSMLFF

SEQ ID NO: 3385 - protein, 13 aa, Artificial Sequence
  Non-cyclic GFR-binding peptide
VSQDLSSLSILFF

SEQ ID NO: 3386 - protein, 17 aa, Artificial Sequence
  Non-cyclic GFR-binding peptide
  MOD_RES (4)..(4): Xaa is C or S
KPTXAPTKLSSLSVLFF

SEQ ID NO: 3387 - protein, 18 aa, Artificial Sequence
  Non-cyclic GFR-binding peptide
  MOD_RES (3)..(3): Xaa is C or S
VKXQPSRVHHSSLSVLFF

SEQ ID NO: 3388 - protein, 12 aa, Artificial Sequence
  Non-cyclic GFR-binding peptide
PQALSSLSILFF

SEQ ID NO: 3389 - protein, 19 aa, Artificial Sequence
  Non-cyclic GFR-binding peptide
  MOD_RES (6)..(6): Xaa is C or S
VTKPTXAPTKLSSLSVLFF

SEQ ID NO: 3390 - protein, 11 aa, Artificial Sequence
  Non-cyclic GFR-binding peptide
QALSSLSILFF

SEQ ID NO: 3391 - protein, 16 aa, Artificial Sequence
  Non-cyclic GFR-binding peptide
  MOD_RES (2)..(3): Xaa is C or S
TXXVPTRLSSLSILFF

SEQ ID NO: 3392 - protein, 18 aa, Artificial Sequence
  Non-cyclic GFR-binding peptide
  MOD_RES (4)..(5): Xaa is C or S
PASXXVPARLSSLSILFF

SEQ ID NO: 3393 - protein, 18 aa, Artificial Sequence
  Non-cyclic GFR-binding peptide
  MOD_RES (4)..(5): Xaa is C or S
PKAXXVPTELSSLSMLFF

SEQ ID NO: 3394 - protein, 11 aa, Artificial Sequence
  Non-cyclic GFR-binding peptide
VKTSSLSMLFF

SEQ ID NO: 3395 - protein, 17 aa, Artificial Sequence
  Non-cyclic GFR-binding peptide
  MOD_RES (3)..(4): Xaa is C or S
ASXXVPARLSSLSILFF

SEQ ID NO: 3396 - protein, 19 aa, Artificial Sequence
  Non-cyclic GFR-binding peptide
  MOD_RES (5)..(6): Xaa is C or S
SAAPXXVPQALSSLSILFF

SEQ ID NO: 3397 - protein, 17 aa, Artificial Sequence
  Non-cyclic GFR-binding peptide
  MOD_RES (3)..(4): Xaa is C or S
APXXVPQALSSLSILFF

SEQ ID NO: 3398 - protein, 12 aa, Artificial Sequence
  Non-cyclic GFR-binding peptide
PVKTSSLSMLFF

SEQ ID NO: 3399 - protein, 17 aa, Artificial Sequence
  Non-cyclic GFR-binding peptide
  MOD_RES (3)..(4): Xaa is C or S
PTXXVPTRLSSLSILFF

SEQ ID NO: 3400 - protein, 19 aa, Artificial Sequence
  Non-cyclic GFR-binding peptide
  MOD_RES (5)..(6): Xaa is C or S
IPKAXXVPTELSSLSMLFF

SEQ ID NO: 3401 - protein, 15 aa, Artificial Sequence
  Non-cyclic GFR-binding peptide
  MOD_RES (1)..(2): Xaa is C or S
XXAPTQLSSLSVLFF

SEQ ID NO: 3402 - protein, 19 aa, Artificial Sequence
  Non-cyclic GFR-binding peptide
  MOD_RES (5)..(6): Xaa is C or S
VPSTXXAPVKTSSLSMLFF

SEQ ID NO: 3403 - protein, 10 aa, Artificial Sequence
  Non-cyclic GFR-binding peptide
HHSSLSVLFF

SEQ ID NO: 3404 - protein, 17 aa, Artificial Sequence
  Non-cyclic GFR-binding peptide
  MOD_RES (3)..(4): Xaa is C or S
STXXAPVKTSSLSMLFF

SEQ ID NO: 3405 - protein, 11 aa, Artificial Sequence
  Non-cyclic GFR-binding peptide
TEESSLSMLFF

SEQ ID NO: 3406 - protein, 13 aa, Artificial Sequence
  Non-cyclic GFR-binding peptide
VPARLSSLSILFF

SEQ ID NO: 3407 - protein, 15 aa, Artificial Sequence
  Non-cyclic GFR-binding peptide
  MOD_RES (1)..(2): Xaa is C or S
XXVPTKLSSLSILFF

SEQ ID NO: 3408 - protein, 14 aa, Artificial Sequence
  Non-cyclic GFR-binding peptide
  MOD_RES (1)..(1): Xaa is C or S
XVPTRLSSLSILFF

SEQ ID NO: 3409 - protein, 20 aa, Artificial Sequence
  Non-cyclic GFR-binding peptide
  MOD_RES (6)..(7): Xaa is C or S
KASKAXXVPTKLSSLSILFF

SEQ ID NO: 3410 - protein, 10 aa, Artificial Sequence
  Non-cyclic GFR-binding peptide
ALSSLSILFF

SEQ ID NO: 3411 - protein, 12 aa, Artificial Sequence
  Non-cyclic GFR-binding peptide
PTKLSSLSVLFF

SEQ ID NO: 3412 - protein, 20 aa, Artificial Sequence
  Non-cyclic GFR-binding peptide
  MOD_RES (6)..(7): Xaa is C or S
HVPKPXXAPTKLSSLSVLFF

SEQ ID NO: 3413 - protein, 12 aa, Artificial Sequence
  Non-cyclic GFR-binding peptide
PTRLSSLSILFF

SEQ ID NO: 3414 - protein, 15 aa, Artificial Sequence
  Non-cyclic GFR-binding peptide
  MOD_RES (1)..(2): Xaa is C or S
XXAPTKLSSLSVLFF

SEQ ID NO: 3415 - protein, 14 aa, Artificial Sequence
  Non-cyclic GFR-binding peptide
  MOD_RES (1)..(1): Xaa is C or S
XVSQDLSSLSILFF

SEQ ID NO: 3416 - protein, 19 aa, Artificial Sequence
  Non-cyclic GFR-binding peptide
  MOD_RES (5)..(6): Xaa is C or S
APASXXVPARLSSLSILFF

SEQ ID NO: 3417 - protein, 13 aa, Artificial Sequence
  Non-cyclic GFR-binding peptide
VPTELSSLSMLFF

SEQ ID NO: 3418 - protein, 18 aa, Artificial Sequence
  Non-cyclic GFR-binding peptide
  MOD_RES (4)..(5): Xaa is C or S
PKPXXAPTKLSSLSVLFF

SEQ ID NO: 3419 - protein, 16 aa, Artificial Sequence
  Non-cyclic GFR-binding peptide
  MOD_RES (2)..(3): Xaa is C or S
AXXAPTKLSSLSVLFF

SEQ ID NO: 3420 - protein, 19 aa, Artificial Sequence
  Non-cyclic GFR-binding peptide
  MOD_RES (5)..(6): Xaa is C or S
SASPXXVSQDLSSLSILFF

SEQ ID NO: 3421 - protein, 9 aa, Artificial Sequence
  Non-cyclic GFR-binding peptide
LSSLSVLFF

SEQ ID NO: 3422 - protein, 14 aa, Artificial Sequence
  Non-cyclic GFR-binding peptide
  MOD_RES (1)..(1): Xaa is C or S
XVPARLSSLSILFF

SEQ ID NO: 3423 - protein, 10 aa, Artificial Sequence
  Non-cyclic GFR-binding peptide
DLSSLSILFF

SEQ ID NO: 3424 - protein, 17 aa, Artificial Sequence
  Non-cyclic GFR-binding peptide
  MOD_RES (3)..(4): Xaa is C or S
KAXXVPTKLSSLSVLFF

SEQ ID NO: 3425 - protein, 19 aa, Artificial Sequence
  Non-cyclic GFR-binding peptide
  MOD_RES (5)..(6): Xaa is C or S
VPKPXXAPTKLSSLSVLFF

SEQ ID NO: 3426 - protein, 19 aa, Artificial Sequence
  Non-cyclic GFR-binding peptide
  MOD_RES (6)..(6): Xaa is C or S
DEGLEXVPTEESSLSMLFF

SEQ ID NO: 3427 - protein, 14 aa, Artificial Sequence
  Non-cyclic GFR-binding peptide
  MOD_RES (1)..(1): Xaa is C or S
XAPTKLSSLSVLFF

SEQ ID NO: 3428 - protein, 11 aa, Artificial Sequence
  Non-cyclic GFR-binding peptide
TKLSSLSILFF

SEQ ID NO: 3429 - protein, 18 aa, Artificial Sequence
  Non-cyclic GFR-binding peptide
  MOD_RES (4)..(5): Xaa is C or S
GKAXXVPTKLSSLSVLFF

SEQ ID NO: 3430 - protein, 20 aa, Artificial Sequence
  Non-cyclic GFR-binding peptide
  MOD_RES (6)..(7): Xaa is C or S
ASASPXXVSQDLSSLSILFF

SEQ ID NO: 3431 - protein, 12 aa, Artificial Sequence
  Non-cyclic GFR-binding peptide
PTKMSSLSMLFF

SEQ ID NO: 3432 - protein, 19 aa, Artificial Sequence
  Non-cyclic GFR-binding peptide
  MOD_RES (4)..(4): Xaa is C or S
SVKXQPSRVHHSSLSVLFF

SEQ ID NO: 3433 - protein, 9 aa, Artificial Sequence
  Non-cyclic GFR-binding peptide
TSSLSMLFF

SEQ ID NO: 3434 - protein, 13 aa, Artificial Sequence
  Non-cyclic GFR-binding peptide
VPTEESSLSMLFF

SEQ ID NO: 3435 - protein, 19 aa, Artificial Sequence
  Non-cyclic GFR-binding peptide
  MOD_RES (5)..(6): Xaa is C or S
SAGPXXTPTKMSSLSMLFF

SEQ ID NO: 3436 - protein, 17 aa, Artificial Sequence
  Non-cyclic GFR-binding peptide
  MOD_RES (3)..(4): Xaa is C or S
KAXXVPTELSSLSMLFF

SEQ ID NO: 3437 - protein, 20 aa, Artificial Sequence
  Non-cyclic GFR-binding peptide
  MOD_RES (6)..(7): Xaa is C or S
ASASPXXVPQDLSSLSILFF

SEQ ID NO: 3438 - protein, 11 aa, Artificial Sequence
  Non-cyclic GFR-binding peptide
TKLSSLSVLFF

SEQ ID NO: 3439 - protein, 16 aa, Artificial Sequence
  Non-cyclic GFR-binding peptide
  MOD_RES (2)..(3): Xaa is C or S
PXXVPQALSSLSILFF

SEQ ID NO: 3440 - protein, 17 aa, Artificial Sequence
  Non-cyclic GFR-binding peptide
  MOD_RES (3)..(4): Xaa is C or S
KPXXAPTKLSSLSVLFF

SEQ ID NO: 3441 - protein, 10 aa, Artificial Sequence
  Non-cyclic GFR-binding peptide
QLSSLSVLFF

SEQ ID NO: 3442 - protein, 20 aa, Artificial Sequence
  Non-cyclic GFR-binding peptide
  MOD_RES (6)..(7): Xaa is C or S
AVPKAXXAPTKLSSLSVLFF

SEQ ID NO: 3443 - protein, 19 aa, Artificial Sequence
  Non-cyclic GFR-binding peptide
  MOD_RES (5)..(6): Xaa is C or S
TPPTXXVPTRLSSLSILFF

SEQ ID NO: 3444 - protein, 17 aa, Artificial Sequence
  Non-cyclic GFR-binding peptide
  MOD_RES (3)..(4): Xaa is C or S
KAXXVPTKLSSLSILFF

SEQ ID NO: 3445 - protein, 13 aa, Artificial Sequence
  Non-cyclic GFR-binding peptide
VPQDLSSLSILFF

SEQ ID NO: 3446 - protein, 10 aa, Artificial Sequence
  Non-cyclic GFR-binding peptide
EESSLSMLFF

SEQ ID NO: 3447 - protein, 19 aa, Artificial Sequence
  Non-cyclic GFR-binding peptide
  MOD_RES (5)..(6): Xaa is C or S
ASKAXXVPTKLSSLSILFF

SEQ ID NO: 3448 - protein, 15 aa, Artificial Sequence
  Non-cyclic GFR-binding peptide
  MOD_RES (2)..(2): Xaa is C or S
EXVPTEESSLSMLFF

SEQ ID NO: 3449 - protein, 20 aa, Artificial Sequence
  Non-cyclic GFR-binding peptide
  MOD_RES (6)..(7): Xaa is C or S
AAPASXXVPARLSSLSILFF

SEQ ID NO: 3450 - protein, 9 aa, Artificial Sequence
  Non-cyclic GFR-binding peptide
MSSLSMLFF

SEQ ID NO: 3451 - protein, 20 aa, Artificial Sequence
  Non-cyclic GFR-binding peptide
  MOD_RES (7)..(7): Xaa is C or S
HVTKPTXAPTKLSSLSVLFF

SEQ ID NO: 3452 - protein, 11 aa, Artificial Sequence
  Non-cyclic GFR-binding peptide
TRLSSLSILFF

SEQ ID NO: 3453 - protein, 9 aa, Artificial Sequence
  Non-cyclic GFR-binding peptide
HSSLSVLFF

SEQ ID NO: 3454 - protein, 17 aa, Artificial Sequence
  Non-cyclic GFR-binding peptide
  MOD_RES (3)..(4): Xaa is C or S
SPXXVPQDLSSLSILFF

SEQ ID NO: 3455 - protein, 14 aa, Artificial Sequence
  Non-cyclic GFR-binding peptide
  MOD_RES (1)..(1): Xaa is C or S
XAPVKTSSLSMLFF

SEQ ID NO: 3456 - protein, 11 aa, Artificial Sequence
  Non-cyclic GFR-binding peptide
VHHSSLSVLFF

SEQ ID NO: 3457 - protein, 11 aa, Artificial Sequence
  Non-cyclic GFR-binding peptide
MIQITINSLDQ

SEQ ID NO: 3458 - protein, 15 aa, Artificial Sequence
  Non-cyclic GFR-binding peptide
  MOD_RES (14)..(15): Xaa is C or S
VKAIKVSRLDQSVXX

SEQ ID NO: 3459 - protein, 10 aa, Artificial Sequence
  Non-cyclic GFR-binding peptide
MIQVTINSLK

SEQ ID NO: 3460 - protein, 15 aa, Artificial Sequence
  Non-cyclic GFR-binding peptide
  MOD_RES (14)..(14): Xaa is C or S
VKAVKVSRLKTPAXT

SEQ ID NO: 3461 - protein, 20 aa, Artificial Sequence
  Non-cyclic GFR-binding peptide
  MOD_RES (14)..(15): Xaa is C or S
VKAVKVSRLKTPAXXPKPVY

SEQ ID NO: 3462 - protein, 12 aa, Artificial Sequence
  Non-cyclic GFR-binding peptide
VKAMKVSRLETP

SEQ ID NO: 3463 - protein, 9 aa, Artificial Sequence
  Non-cyclic GFR-binding peptide
VKAMKVSRL

SEQ ID NO: 3464 - protein, 19 aa, Artificial Sequence
  Non-cyclic GFR-binding peptide
  MOD_RES (14)..(14): Xaa is C or S
IKRVQVPRLKTPAXTPKTV

SEQ ID NO: 3465 - protein, 20 aa, Artificial Sequence
  Non-cyclic GFR-binding peptide
  MOD_RES (14)..(15): Xaa is C or S
MIQITINSLAQPVXXPAASA

SEQ ID NO: 3466 - protein, 19 aa, Artificial Sequence
  Non-cyclic GFR-binding peptide
  MOD_RES (14)..(15): Xaa is C or S
VKAVKVSRLQTPAXXPKPV

SEQ ID NO: 3467 - protein, 11 aa, Artificial Sequence
  Non-cyclic GFR-binding peptide
MIQMTINSLET

SEQ ID NO: 3468 - protein, 16 aa, Artificial Sequence
  Non-cyclic GFR-binding peptide
  MOD_RES (14)..(15): Xaa is C or S
VKAIKVSRLDQSVXXP

SEQ ID NO: 3469 - protein, 9 aa, Artificial Sequence
  Non-cyclic GFR-binding peptide
IKRIQVPRL

SEQ ID NO: 3470 - protein, 20 aa, Artificial Sequence
  Non-cyclic GFR-binding peptide
  MOD_RES (14)..(14): Xaa is C or S
VKAVKVSRLKTPAXTPKTVH

SEQ ID NO: 3471 - protein, 12 aa, Artificial Sequence
  Non-cyclic GFR-binding peptide
VKAVKVSRLKTP

SEQ ID NO: 3472 - protein, 13 aa, Artificial Sequence
  Non-cyclic GFR-binding peptide
VKAVKVSRLKTPA

SEQ ID NO: 3473 - protein, 11 aa, Artificial Sequence
  Non-cyclic GFR-binding peptide
YYLVTLPELQV

SEQ ID NO: 3474 - protein, 17 aa, Artificial Sequence
  Non-cyclic GFR-binding peptide
  MOD_RES (14)..(15): Xaa is C or S
IKRIQVPRLAQPVXXPA

SEQ ID NO: 3475 - protein, 15 aa, Artificial Sequence
  Non-cyclic GFR-binding peptide
YYLVTLPELQVQTPR

SEQ ID NO: 3476 - protein, 18 aa, Artificial Sequence
  Non-cyclic GFR-binding peptide
  MOD_RES (14)..(15): Xaa is C or S
MIQVTINSLQTPAXXPKP

SEQ ID NO: 3477 - protein, 14 aa, Artificial Sequence
  Non-cyclic GFR-binding peptide
  MOD_RES (14)..(14): Xaa is C or S
MIQMTINSLETPVX

SEQ ID NO: 3478 - protein, 13 aa, Artificial Sequence
  Non-cyclic GFR-binding peptide
VKAIKVSRLDQSV

SEQ ID NO: 3479 - protein, 14 aa, Artificial Sequence
  Non-cyclic GFR-binding peptide
  MOD_RES (14)..(14): Xaa is C or S
MIQITINSLDQPVX

SEQ ID NO: 3480 - protein, 18 aa, Artificial Sequence
  Non-cyclic GFR-binding peptide
  MOD_RES (14)..(14): Xaa is C or S
IKRVQVPRLKTPAXTPKT

SEQ ID NO: 3481 - protein, 14 aa, Artificial Sequence
  Non-cyclic GFR-binding peptide
  MOD_RES (14)..(14): Xaa is C or S
YYLMTLPEEETPVX

SEQ ID NO: 3482 - protein, 14 aa, Artificial Sequence
  Non-cyclic GFR-binding peptide
  MOD_RES (14)..(14): Xaa is C or S
IKRMQVPRLETPVX

SEQ ID NO: 3483 - protein, 17 aa, Artificial Sequence
  Non-cyclic GFR-binding peptide
  MOD_RES (14)..(15): Xaa is C or S
IKRVQVPRLQTPAXXPK

SEQ ID NO: 3484 - protein, 17 aa, Artificial Sequence
  Non-cyclic GFR-binding peptide
  MOD_RES (14)..(15): Xaa is C or S
IKRVQVPRLKTPAXXPK

SEQ ID NO: 3485 - protein, 17 aa, Artificial Sequence
  Non-cyclic GFR-binding peptide
  MOD_RES (16)..(16): Xaa is C or S
YYVVPLPEHHVRSPQXK

SEQ ID NO: 3486 - protein, 20 aa, Artificial Sequence
  Non-cyclic GFR-binding peptide
  MOD_RES (14)..(15): Xaa is C or S
IKRIQVPRLDQPVXXPSASA

SEQ ID NO: 3487 - protein, 11 aa, Artificial Sequence
  Non-cyclic GFR-binding peptide
IKRVQVPRLQT

SEQ ID NO: 3488 - protein, 17 aa, Artificial Sequence
  Non-cyclic GFR-binding peptide
  MOD_RES (14)..(15): Xaa is C or S
MIQITINSLAQPVXXPA

SEQ ID NO: 3489 - protein, 16 aa, Artificial Sequence
  Non-cyclic GFR-binding peptide
  MOD_RES (14)..(15): Xaa is C or S
VKAIKVSRLAQPVXXP

SEQ ID NO: 3490 - protein, 18 aa, Artificial Sequence
  Non-cyclic GFR-binding peptide
  MOD_RES (14)..(15): Xaa is C or S
MIQMTINSLETPVXXAKP

SEQ ID NO: 3491 - protein, 17 aa, Artificial Sequence
  Non-cyclic GFR-binding peptide
  MOD_RES (14)..(15): Xaa is C or S
MIQMTINSLETPVXXAK

SEQ ID NO: 3492 - protein, 12 aa, Artificial Sequence
  Non-cyclic GFR-binding peptide
MIQVTINSLQTP

SEQ ID NO: 3493 - protein, 17 aa, Artificial Sequence
  Non-cyclic GFR-binding peptide
  MOD_RES (14)..(15): Xaa is C or S
VKAIKVSRLDQSVXXPS

SEQ ID NO: 3494 - protein, 13 aa, Artificial Sequence
  Non-cyclic GFR-binding peptide
IKRMQVPRLETPV

SEQ ID NO: 3495 - protein, 20 aa, Artificial Sequence
  Non-cyclic GFR-binding peptide
  MOD_RES (14)..(15): Xaa is C or S
IKRIQVPRLAQPVXXPAASA

SEQ ID NO: 3496 - protein, 15 aa, Artificial Sequence
  Non-cyclic GFR-binding peptide
  MOD_RES (14)..(15): Xaa is C or S
VKAVKVSRLKTPAXX

SEQ ID NO: 3497 - protein, 10 aa, Artificial Sequence
  Non-cyclic GFR-binding peptide
MIQMTINSLE

SEQ ID NO: 3498 - protein, 19 aa, Artificial Sequence
  Non-cyclic GFR-binding peptide
  MOD_RES (14)..(15): Xaa is C or S
VKAIKVSRLDQSVXXPSAS

SEQ ID NO: 3499 - protein, 14 aa, Artificial Sequence
  Non-cyclic GFR-binding peptide
  MOD_RES (14)..(14): Xaa is C or S
YYVMPLPEEETPVX

SEQ ID NO: 3500 - protein, 19 aa, Artificial Sequence
  Non-cyclic GFR-binding peptide
  MOD_RES (14)..(15): Xaa is C or S
VKAMKVSRLETPVXXAKPI

SEQ ID NO: 3501 - protein, 20 aa, Artificial Sequence
  Non-cyclic GFR-binding peptide
  MOD_RES (14)..(14): Xaa is C or S
YYLMTLPEEETPVXELGEDN

SEQ ID NO: 3502 - protein, 14 aa, Artificial Sequence
  Non-cyclic GFR-binding peptide
  MOD_RES (14)..(14): Xaa is C or S
VKAIKVSRLAQPVX

SEQ ID NO: 3503 - protein, 15 aa, Artificial Sequence
  Non-cyclic GFR-binding peptide
  MOD_RES (14)..(15): Xaa is C or S
IKRMQVPRLETPVXX

SEQ ID NO: 3504 - protein, 14 aa, Artificial Sequence
  Non-cyclic GFR-binding peptide
  MOD_RES (14)..(14): Xaa is C or S
IKRIQVPRLDQSVX

SEQ ID NO: 3505 - protein, 15 aa, Artificial Sequence
  Non-cyclic GFR-binding peptide
  MOD_RES (14)..(14): Xaa is C or S
YYLMTLPEEETPVXE

SEQ ID NO: 3506 - protein, 16 aa, Artificial Sequence
  Non-cyclic GFR-binding peptide
  MOD_RES (14)..(15): Xaa is C or S
VKAMKVSRLETPVXXA

SEQ ID NO: 3507 - protein, 14 aa, Artificial Sequence
  Non-cyclic GFR-binding peptide
  MOD_RES (14)..(14): Xaa is C or S
MIQVTINSLKTPAX

SEQ ID NO: 3508 - protein, 13 aa, Artificial Sequence
  Non-cyclic GFR-binding peptide
VKAVKVSRLQTPA

SEQ ID NO: 3509 - protein, 15 aa, Artificial Sequence
  Non-cyclic GFR-binding peptide
  MOD_RES (14)..(15): Xaa is C or S
VKAVKVSRLQTPAXX

SEQ ID NO: 3510 - protein, 16 aa, Artificial Sequence
  Non-cyclic GFR-binding peptide
  MOD_RES (16)..(16): Xaa is C or S
YYVVPLPELQVQTPRX

SEQ ID NO: 3511 - protein, 17 aa, Artificial Sequence
  Non-cyclic GFR-binding peptide
  MOD_RES (14)..(15): Xaa is C or S
MIQITINSLDQPVXXPS

SEQ ID NO: 3512 - protein, 10 aa, Artificial Sequence
  Non-cyclic GFR-binding peptide
IKRIQVPRLD

SEQ ID NO: 3513 - protein, 12 aa, Artificial Sequence
  Non-cyclic GFR-binding peptide
YYLVTLPELQVQ

SEQ ID NO: 3514 - protein, 11 aa, Artificial Sequence
  Non-cyclic GFR-binding peptide
MIQVTINSLKT

SEQ ID NO: 3515 - protein, 13 aa, Artificial Sequence
  Non-cyclic GFR-binding peptide
IKRIQVPRLDQPV

SEQ ID NO: 3516 - protein, 12 aa, Artificial Sequence
  Non-cyclic GFR-binding peptide
VKAIKVSRLDQP

SEQ ID NO: 3517 - protein, 15 aa, Artificial Sequence
  Non-cyclic GFR-binding peptide
  MOD_RES (14)..(15): Xaa is C or S
IKRIQVPRLDQPVXX

SEQ ID NO: 3518 - protein, 15 aa, Artificial Sequence
  Non-cyclic GFR-binding peptide
  MOD_RES (14)..(15): Xaa is C or S
MIQMTINSLETPVXX

SEQ ID NO: 3519 - protein, 20 aa, Artificial Sequence
  Non-cyclic GFR-binding peptide
  MOD_RES (14)..(15): Xaa is C or S
VKAMKVSRLETPVXXAKPIK

SEQ ID NO: 3520 - protein, 13 aa, Artificial Sequence
  Non-cyclic GFR-binding peptide
YYLMTLPEEETPV

SEQ ID NO: 3521 - protein, 12 aa, Artificial Sequence
  Non-cyclic GFR-binding peptide
VKAIKVSRLDQS

SEQ ID NO: 3522 - protein, 16 aa, Artificial Sequence
  Non-cyclic GFR-binding peptide
  MOD_RES (14)..(15): Xaa is C or S
VKAIKVSRLDQPVXXP

SEQ ID NO: 3523 - protein, 19 aa, Artificial Sequence
  Non-cyclic GFR-binding peptide
  MOD_RES (14)..(14): Xaa is C or S
YYLMTLPEEETPVXELGED

SEQ ID NO: 3524 - protein, 17 aa, Artificial Sequence
  Non-cyclic GFR-binding peptide
  MOD_RES (14)..(15): Xaa is C or S
VKAVKVSRLQTPAXXPK

SEQ ID NO: 3525 - protein, 14 aa, Artificial Sequence
  Non-cyclic GFR-binding peptide
YYVVPLPELQVQTP

SEQ ID NO: 3526 - protein, 15 aa, Artificial Sequence
  Non-cyclic GFR-binding peptide
  MOD_RES (14)..(15): Xaa is C or S
VKAIKVSRLDQPVXX

SEQ ID NO: 3527 - protein, 19 aa, Artificial Sequence
  Non-cyclic GFR-binding peptide
  MOD_RES (14)..(15): Xaa is C or S
IKRMQVPRLETPVXXAKPI

SEQ ID NO: 3528 - protein, 18 aa, Artificial Sequence
  Non-cyclic GFR-binding peptide
  MOD_RES (16)..(16): Xaa is C or S
YYVVPLPEHHVRSPQXKV

SEQ ID NO: 3529 - protein, 16 aa, Artificial Sequence
  Non-cyclic GFR-binding peptide
  MOD_RES (16)..(16): Xaa is C or S
YYVVPLPEHHVRSPQX

SEQ ID NO: 3530 - protein, 19 aa, Artificial Sequence
  Non-cyclic GFR-binding peptide
  MOD_RES (14)..(15): Xaa is C or S
MIQITINSLDQSVXXPSAS

SEQ ID NO: 3531 - protein, 12 aa, Artificial Sequence
  Non-cyclic GFR-binding peptide
YYLVTLPEHHVR

SEQ ID NO: 3532 - protein, 17 aa, Artificial Sequence
  Non-cyclic GFR-binding peptide
  MOD_RES (14)..(15): Xaa is C or S
IKRIQVPRLDQSVXXPS

SEQ ID NO: 3533 - protein, 18 aa, Artificial Sequence
  Non-cyclic GFR-binding peptide
  MOD_RES (14)..(14): Xaa is C or S
VKAVKVSRLKTPAXTPKT

SEQ ID NO: 3534 - protein, 10 aa, Artificial Sequence
  Non-cyclic GFR-binding peptide
IKRVQVPRLK

SEQ ID NO: 3535 - protein, 19 aa, Artificial Sequence
  Non-cyclic GFR-binding peptide
  MOD_RES (14)..(15): Xaa is C or S
IKRIQVPRLDQPVXXPSAS

SEQ ID NO: 3536 - protein, 11 aa, Artificial Sequence
  Non-cyclic GFR-binding peptide
YYVVPLPEHHV

SEQ ID NO: 3537 - protein, 16 aa, Artificial Sequence
  Non-cyclic GFR-binding peptide
  MOD_RES (14)..(14): Xaa is C or S
VKAVKVSRLKTPAXTP

SEQ ID NO: 3538 - protein, 11 aa, Artificial Sequence
  Non-cyclic GFR-binding peptide
IKRIQVPRLDQ

SEQ ID NO: 3539 - protein, 11 aa, Artificial Sequence
  Non-cyclic GFR-binding peptide
YYVMPLPEEET

SEQ ID NO: 3540 - protein, 10 aa, Artificial Sequence
  Non-cyclic GFR-binding peptide
YYLVTLPEHH

SEQ ID NO: 3541 - protein, 11 aa, Artificial Sequence
  Non-cyclic GFR-binding peptide
MIQVTINSLQT

SEQ ID NO: 3542 - protein, 17 aa, Artificial Sequence
  Non-cyclic GFR-binding peptide
  MOD_RES (14)..(14): Xaa is C or S
YYLMTLPEEETPVXELG

SEQ ID NO: 3543 - protein, 18 aa, Artificial Sequence
  Non-cyclic GFR-binding peptide
  MOD_RES (14)..(14): Xaa is C or S
YYLMTLPEEETPVXELGE

SEQ ID NO: 3544 - protein, 18 aa, Artificial Sequence
  Non-cyclic GFR-binding peptide
  MOD_RES (14)..(15): Xaa is C or S
VKAVKVSRLKTPAXXPKP

SEQ ID NO: 3545 - protein, 15 aa, Artificial Sequence
  Non-cyclic GFR-binding peptide
YYLVTLPEHHVRSPQ

SEQ ID NO: 3546 - protein, 16 aa, Artificial Sequence
  Non-cyclic GFR-binding peptide
  MOD_RES (14)..(15): Xaa is C or S
IKRVQVPRLKTPAXXP

SEQ ID NO: 3547 - protein, 13 aa, Artificial Sequence
  Non-cyclic GFR-binding peptide
VKAIKVSRLDQPV

SEQ ID NO: 3548 - protein, 10 aa, Artificial Sequence
  Non-cyclic GFR-binding peptide
VKAIKVSRLD

SEQ ID NO: 3549 - protein, 11 aa, Artificial Sequence
  Non-cyclic GFR-binding peptide
VKAIKVSRLAQ

SEQ ID NO: 3550 - protein, 20 aa, Artificial Sequence
  Non-cyclic GFR-binding peptide
  MOD_RES (14)..(15): Xaa is C or S
MIQVTINSLQTPAXXPKPVT

SEQ ID NO: 3551 - protein, 12 aa, Artificial Sequence
  Non-cyclic GFR-binding peptide
IKRMQVPRLETP

SEQ ID NO: 3552 - protein, 20 aa, Artificial Sequence
  Non-cyclic GFR-binding peptide
  MOD_RES (14)..(14): Xaa is C or S
YYVMPLPEEETPVXELGEDN

SEQ ID NO: 3553 - protein, 16 aa, Artificial Sequence
  Non-cyclic GFR-binding peptide
  MOD_RES (14)..(15): Xaa is C or S
VKAVKVSRLKTPAXXP

SEQ ID NO: 3554 - protein, 18 aa, Artificial Sequence
  Non-cyclic GFR-binding peptide
  MOD_RES (14)..(14): Xaa is C or S
YYVMPLPEEETPVXELGE

SEQ ID NO: 3555 - protein, 17 aa, Artificial Sequence
  Non-cyclic GFR-binding peptide
  MOD_RES (14)..(15): Xaa is C or S
MIQITINSLDQSVXXPS

SEQ ID NO: 3556 - protein, 12 aa, Artificial Sequence
  Non-cyclic GFR-binding peptide
YYVVPLPEHHVR

SEQ ID NO: 3557 - protein, 16 aa, Artificial Sequence
  Non-cyclic GFR-binding peptide
  MOD_RES (14)..(14): Xaa is C or S
IKRVQVPRLKTPAXTP

SEQ ID NO: 3558 - protein, 14 aa, Artificial Sequence
  Non-cyclic GFR-binding peptide
YYLVTLPEHHVRSP

SEQ ID NO: 3559 - protein, 15 aa, Artificial Sequence
  Non-cyclic GFR-binding peptide
YYVVPLPEHHVRSPQ

SEQ ID NO: 3560 - protein, 16 aa, Artificial Sequence
  Non-cyclic GFR-binding peptide
  MOD_RES (14)..(15): Xaa is C or S
VKAVKVSRLQTPAXXP

SEQ ID NO: 3561 - protein, 15 aa, Artificial Sequence
  Non-cyclic GFR-binding peptide
  MOD_RES (14)..(15): Xaa is C or S
VKAIKVSRLAQPVXX

SEQ ID NO: 3562 - protein, 13 aa, Artificial Sequence
  Non-cyclic GFR-binding peptide
MIQMTINSLETPV

SEQ ID NO: 3563 - protein, 10 aa, Artificial Sequence
  Non-cyclic GFR-binding peptide
VKAIKVSRLA

SEQ ID NO: 3564 - protein, 15 aa, Artificial Sequence
  Non-cyclic GFR-binding peptide
  MOD_RES (14)..(15): Xaa is C or S
IKRIQVPRLDQSVXX

SEQ ID NO: 3565 - protein, 18 aa, Artificial Sequence
  Non-cyclic GFR-binding peptide
  MOD_RES (16)..(16): Xaa is C or S
YYLVTLPEHHVRSPQXKV

SEQ ID NO: 3566 - protein, 12 aa, Artificial Sequence
  Non-cyclic GFR-binding peptide
MIQVTINSLKTP

SEQ ID NO: 3567 - protein, 20 aa, Artificial Sequence
  Non-cyclic GFR-binding peptide
  MOD_RES (16)..(16): Xaa is C or S
YYVVPLPEHHVRSPQXKVSS

SEQ ID NO: 3568 - protein, 20 aa, Artificial Sequence
  Non-cyclic GFR-binding peptide
  MOD_RES (14)..(15): Xaa is C or S
IKRVQVPRLKTPAXXPKPVY

SEQ ID NO: 3569 - protein, 16 aa, Artificial Sequence
  Non-cyclic GFR-binding peptide
  MOD_RES (14)..(15): Xaa is C or S
IKRIQVPRLDQPVXXP

SEQ ID NO: 3570 - protein, 12 aa, Artificial Sequence
  Non-cyclic GFR-binding peptide
YYVVPLPELQVQ

SEQ ID NO: 3571 - protein, 11 aa, Artificial Sequence
  Non-cyclic GFR-binding peptide
YYLMTLPEEET

SEQ ID NO: 3572 - protein, 12 aa, Artificial Sequence
  Non-cyclic GFR-binding peptide
IKRVQVPRLQTP

SEQ ID NO: 3573 - protein, 11 aa, Artificial Sequence
  Non-cyclic GFR-binding peptide
IKRIQVPRLAQ

SEQ ID NO: 3574 - protein, 14 aa, Artificial Sequence
  Non-cyclic GFR-binding peptide
  MOD_RES (14)..(14): Xaa is C or S
VKAIKVSRLDQSVX

SEQ ID NO: 3575 - protein, 20 aa, Artificial Sequence
  Non-cyclic GFR-binding peptide
  MOD_RES (14)..(15): Xaa is C or S
MIQITINSLDQPVXXPSASA

SEQ ID NO: 3576 - protein, 19 aa, Artificial Sequence
  Non-cyclic GFR-binding peptide
  MOD_RES (14)..(15): Xaa is C or S
MIQITINSLAQPVXXPAAS

SEQ ID NO: 3577 - protein, 13 aa, Artificial Sequence
  Non-cyclic GFR-binding peptide
IKRIQVPRLDQSV

SEQ ID NO: 3578 - protein, 17 aa, Artificial Sequence
  Non-cyclic GFR-binding peptide
  MOD_RES (14)..(15): Xaa is C or S
IKRIQVPRLDQPVXXPS

SEQ ID NO: 3579 - protein, 19 aa, Artificial Sequence
  Non-cyclic GFR-binding peptide
  MOD_RES (14)..(14): Xaa is C or S
YYVMPLPEEETPVXELGED

SEQ ID NO: 3580 - protein, 18 aa, Artificial Sequence
  Non-cyclic GFR-binding peptide
  MOD_RES (14)..(15): Xaa is C or S
VKAIKVSRLAQPVXXPAA

SEQ ID NO: 3581 - protein, 13 aa, Artificial Sequence
  Non-cyclic GFR-binding peptide
YYVMPLPEEETPV

SEQ ID NO: 3582 - protein, 13 aa, Artificial Sequence
  Non-cyclic GFR-binding peptide
VKAIKVSRLAQPV

SEQ ID NO: 3583 - protein, 13 aa, Artificial Sequence
  Non-cyclic GFR-binding peptide
YYVVPLPEHHVRS

SEQ ID NO: 3584 - protein, 10 aa, Artificial Sequence
  Non-cyclic GFR-binding peptide
IKRMQVPRLE

SEQ ID NO: 3585 - protein, 16 aa, Artificial Sequence
  Non-cyclic GFR-binding peptide
  MOD_RES (16)..(16): Xaa is C or S
YYLVTLPEHHVRSPQX

SEQ ID NO: 3586 - protein, 9 aa, Artificial Sequence
  Non-cyclic GFR-binding peptide
YYVMPLPEE

SEQ ID NO: 3587 - protein, 19 aa, Artificial Sequence
  Non-cyclic GFR-binding peptide
  MOD_RES (14)..(15): Xaa is C or S
VKAIKVSRLDQPVXXPSAS

SEQ ID NO: 3588 - protein, 17 aa, Artificial Sequence
  Non-cyclic GFR-binding peptide
  MOD_RES (14)..(14): Xaa is C or S
YYVMPLPEEETPVXELG

SEQ ID NO: 3589 - protein, 10 aa, Artificial Sequence
  Non-cyclic GFR-binding peptide
IKRIQVPRLA

SEQ ID NO: 3590 - protein, 16 aa, Artificial Sequence
  Non-cyclic GFR-binding peptide
  MOD_RES (14)..(15): Xaa is C or S
IKRIQVPRLAQPVXXP

SEQ ID NO: 3591 - protein, 20 aa, Artificial Sequence
  Non-cyclic GFR-binding peptide
  MOD_RES (14)..(15): Xaa is C or S
MIQMTINSLETPVXXAKPIS

SEQ ID NO: 3592 - protein, 12 aa, Artificial Sequence
  Non-cyclic GFR-binding peptide
MIQMTINSLETP

SEQ ID NO: 3593 - protein, 20 aa, Artificial Sequence
  Non-cyclic GFR-binding peptide
  MOD_RES (14)..(15): Xaa is C or S
VKAIKVSRLDQPVXXPSASA

SEQ ID NO: 3594 - protein, 17 aa, Artificial Sequence
  Non-cyclic GFR-binding peptide
  MOD_RES (14)..(15): Xaa is C or S
VKAVKVSRLKTPAXXPK

SEQ ID NO: 3595 - protein, 19 aa, Artificial Sequence
  Non-cyclic GFR-binding peptide
  MOD_RES (14)..(15): Xaa is C or S
IKRIQVPRLDQSVXXPSAS

SEQ ID NO: 3596 - protein, 9 aa, Artificial Sequence
  Non-cyclic GFR-binding peptide
MIQMTINSL

SEQ ID NO: 3597 - protein, 15 aa, Artificial Sequence
  Non-cyclic GFR-binding peptide
  MOD_RES (14)..(14): Xaa is C or S
MIQVTINSLKTPAXT

SEQ ID NO: 3598 - protein, 20 aa, Artificial Sequence
  Non-cyclic GFR-binding peptide
  MOD_RES (14)..(15): Xaa is C or S
VKAIKVSRLAQPVXXPAASA

SEQ ID NO: 3599 - protein, 13 aa, Artificial Sequence
  Non-cyclic GFR-binding peptide
IKRVQVPRLQTPA

SEQ ID NO: 3600 - protein, 13 aa, Artificial Sequence
  Non-cyclic GFR-binding peptide
MIQVTINSLKTPA

SEQ ID NO: 3601 - protein, 15 aa, Artificial Sequence
  Non-cyclic GFR-binding peptide
  MOD_RES (14)..(15): Xaa is C or S
IKRIQVPRLAQPVXX

SEQ ID NO: 3602 - protein, 14 aa, Artificial Sequence
  Non-cyclic GFR-binding peptide
  MOD_RES (14)..(14): Xaa is C or S
VKAMKVSRLETPVX

SEQ ID NO: 3603 - protein, 11 aa, Artificial Sequence
  Non-cyclic GFR-binding peptide
VKAIKVSRLDQ

SEQ ID NO: 3604 - protein, 14 aa, Artificial Sequence
  Non-cyclic GFR-binding peptide
  MOD_RES (14)..(14): Xaa is C or S
MIQITINSLAQPVX

SEQ ID NO: 3605 - protein, 20 aa, Artificial Sequence
  Non-cyclic GFR-binding peptide
  MOD_RES (14)..(15): Xaa is C or S
MIQVTINSLKTPAXXPKPVY

SEQ ID NO: 3606 - protein, 18 aa, Artificial Sequence
  Non-cyclic GFR-binding peptide
  MOD_RES (14)..(15): Xaa is C or S
IKRIQVPRLDQPVXXPSA

SEQ ID NO: 3607 - protein, 17 aa, Artificial Sequence
  Non-cyclic GFR-binding peptide
  MOD_RES (16)..(16): Xaa is C or S
YYLVTLPELQVQTPRXQ

SEQ ID NO: 3608 - protein, 18 aa, Artificial Sequence
  Non-cyclic GFR-binding peptide
  MOD_RES (16)..(16): Xaa is C or S
YYLVTLPELQVQTPRXQV

SEQ ID NO: 3609 - protein, 16 aa, Artificial Sequence
  Non-cyclic GFR-binding peptide
  MOD_RES (14)..(15): Xaa is C or S
MIQITINSLDQSVXXP

SEQ ID NO: 3610 - protein, 11 aa, Artificial Sequence
  Non-cyclic GFR-binding peptide
VKAMKVSRLET

SEQ ID NO: 3611 - protein, 20 aa, Artificial Sequence
  Non-cyclic GFR-binding peptide
  MOD_RES (16)..(16): Xaa is C or S
YYLVTLPELQVQTPRXQVNR

SEQ ID NO: 3612 - protein, 18 aa, Artificial Sequence
  Non-cyclic GFR-binding peptide
  MOD_RES (14)..(15): Xaa is C or S
IKRIQVPRLAQPVXXPAA

SEQ ID NO: 3613 - protein, 14 aa, Artificial Sequence
  Non-cyclic GFR-binding peptide
  MOD_RES (14)..(14): Xaa is C or S
MIQVTINSLQTPAX

SEQ ID NO: 3614 - protein, 19 aa, Artificial Sequence
  Non-cyclic GFR-binding peptide
  MOD_RES (14)..(15): Xaa is C or S
MIQITINSLDQPVXXPSAS

SEQ ID NO: 3615 - protein, 17 aa, Artificial Sequence
  Non-cyclic GFR-binding peptide
  MOD_RES (14)..(15): Xaa is C or S
VKAIKVSRLAQPVXXPA

SEQ ID NO: 3616 - protein, 13 aa, Artificial Sequence
  Non-cyclic GFR-binding peptide
YYLVTLPEHHVRS

SEQ ID NO: 3617 - protein, 16 aa, Artificial Sequence
  Non-cyclic GFR-binding peptide
  MOD_RES (14)..(15): Xaa is C or S
MIQMTINSLETPVXXA

SEQ ID NO: 3618 - protein, 19 aa, Artificial Sequence
  Non-cyclic GFR-binding peptide
  MOD_RES (14)..(15): Xaa is C or S
MIQVTINSLQTPAXXPKPV

SEQ ID NO: 3619 - protein, 17 aa, Artificial Sequence
  Non-cyclic GFR-binding peptide
  MOD_RES (14)..(15): Xaa is C or S
VKAIKVSRLDQPVXXPS

SEQ ID NO: 3620 - protein, 11 aa, Artificial Sequence
  Non-cyclic GFR-binding peptide
VKAVKVSRLKT

SEQ ID NO: 3621 - protein, 17 aa, Artificial Sequence
  Non-cyclic GFR-binding peptide
  MOD_RES (14)..(15): Xaa is C or S
VKAMKVSRLETPVXXAK

SEQ ID NO: 3622 - protein, 20 aa, Artificial Sequence
  Non-cyclic GFR-binding peptide
  MOD_RES (14)..(15): Xaa is C or S
IKRVQVPRLQTPAXXPKPVT

SEQ ID NO: 3623 - protein, 12 aa, Artificial Sequence
  Non-cyclic GFR-binding peptide
YYLMTLPEEETP

SEQ ID NO: 3624 - protein, 12 aa, Artificial Sequence
  Non-cyclic GFR-binding peptide
MIQITINSLDQP

SEQ ID NO: 3625 - protein, 16 aa, Artificial Sequence
  Non-cyclic GFR-binding peptide
  MOD_RES (14)..(15): Xaa is C or S
MIQVTINSLKTPAXXP

SEQ ID NO: 3626 - protein, 19 aa, Artificial Sequence
  Non-cyclic GFR-binding peptide
  MOD_RES (14)..(15): Xaa is C or S
IKRVQVPRLQTPAXXPKPV

SEQ ID NO: 3627 - protein, 20 aa, Artificial Sequence
  Non-cyclic GFR-binding peptide
  MOD_RES (16)..(16): Xaa is C or S
YYLVTLPEHHVRSPQXKVSS

SEQ ID NO: 3628 - protein, 11 aa, Artificial Sequence
  Non-cyclic GFR-binding peptide
MIQITINSLAQ

SEQ ID NO: 3629 - protein, 15 aa, Artificial Sequence
  Non-cyclic GFR-binding peptide
  MOD_RES (14)..(15): Xaa is C or S
MIQVTINSLQTPAXX

SEQ ID NO: 3630 - protein, 16 aa, Artificial Sequence
  Non-cyclic GFR-binding peptide
  MOD_RES (14)..(15): Xaa is C or S
IKRIQVPRLDQSVXXP

SEQ ID NO: 3631 - protein, 12 aa, Artificial Sequence
  Non-cyclic GFR-binding peptide
VKAIKVSRLAQP

SEQ ID NO: 3632 - protein, 18 aa, Artificial Sequence
  Non-cyclic GFR-binding peptide
  MOD_RES (14)..(15): Xaa is C or S
MIQITINSLAQPVXXPAA

SEQ ID NO: 3633 - protein, 19 aa, Artificial Sequence
  Non-cyclic GFR-binding peptide
  MOD_RES (14)..(14): Xaa is C or S
VKAVKVSRLKTPAXTPKTV

SEQ ID NO: 3634 - protein, 13 aa, Artificial Sequence
  Non-cyclic GFR-binding peptide
MIQITINSLDQSV

SEQ ID NO: 3635 - protein, 18 aa, Artificial Sequence
  Non-cyclic GFR-binding peptide
  MOD_RES (16)..(16): Xaa is C or S
YYVVPLPELQVQTPRXQV

SEQ ID NO: 3636 - protein, 18 aa, Artificial Sequence
  Non-cyclic GFR-binding peptide
  MOD_RES (14)..(15): Xaa is C or S
VKAIKVSRLDQSVXXPSA

SEQ ID NO: 3637 - protein, 12 aa, Artificial Sequence
  Non-cyclic GFR-binding peptide
IKRIQVPRLDQS

SEQ ID NO: 3638 - protein, 19 aa, Artificial Sequence
  Non-cyclic GFR-binding peptide
  MOD_RES (16)..(16): Xaa is C or S
YYVVPLPEHHVRSPQXKVS

SEQ ID NO: 3639 - protein, 9 aa, Artificial Sequence
  Non-cyclic GFR-binding peptide
VKAIKVSRL

SEQ ID NO: 3640 - protein, 12 aa, Artificial Sequence
  Non-cyclic GFR-binding peptide
IKRVQVPRLKTP

SEQ ID NO: 3641 - protein, 14 aa, Artificial Sequence
  Non-cyclic GFR-binding peptide
  MOD_RES (14)..(14): Xaa is C or S
VKAVKVSRLKTPAX

SEQ ID NO: 3642 - protein, 18 aa, Artificial Sequence
  Non-cyclic GFR-binding peptide
  MOD_RES (14)..(15): Xaa is C or S
MIQITINSLDQPVXXPSA

SEQ ID NO: 3643 - protein, 18 aa, Artificial Sequence
  Non-cyclic GFR-binding peptide
  MOD_RES (14)..(15): Xaa is C or S
IKRVQVPRLKTPAXXPKP

SEQ ID NO: 3644 - protein, 16 aa, Artificial Sequence
  Non-cyclic GFR-binding peptide
  MOD_RES (14)..(14): Xaa is C or S
MIQVTINSLKTPAXTP

SEQ ID NO: 3645 - protein, 9 aa, Artificial Sequence
  Non-cyclic GFR-binding peptide
IKRMQVPRL

SEQ ID NO: 3646 - protein, 12 aa, Artificial Sequence
  Non-cyclic GFR-binding peptide
YYVMPLPEEETP

SEQ ID NO: 3647 - protein, 10 aa, Artificial Sequence
  Non-cyclic GFR-binding peptide
VKAMKVSRLE

SEQ ID NO: 3648 - protein, 9 aa, Artificial Sequence
  Non-cyclic GFR-binding peptide
YYLMTLPEE

SEQ ID NO: 3649 - protein, 12 aa, Artificial Sequence
  Non-cyclic GFR-binding peptide
VKAVKVSRLQTP

SEQ ID NO: 3650 - protein, 19 aa, Artificial Sequence
  Non-cyclic GFR-binding peptide
  MOD_RES (14)..(15): Xaa is C or S
MIQMTINSLETPVXXAKPI

SEQ ID NO: 3651 - protein, 13 aa, Artificial Sequence
  Non-cyclic GFR-binding peptide
IKRIQVPRLAQPV

SEQ ID NO: 3652 - protein, 11 aa, Artificial Sequence
  Non-cyclic GFR-binding peptide
YYLVTLPEHHV

SEQ ID NO: 3653 - protein, 10 aa, Artificial Sequence
  Non-cyclic GFR-binding peptide
VKAVKVSRLK

SEQ ID NO: 3654 - protein, 19 aa, Artificial Sequence
  Non-cyclic GFR-binding peptide
  MOD_RES (14)..(15): Xaa is C or S
MIQVTINSLKTPAXXPKPV

SEQ ID NO: 3655 - protein, 16 aa, Artificial Sequence
  Non-cyclic GFR-binding peptide
  MOD_RES (14)..(15): Xaa is C or S
MIQITINSLAQPVXXP

SEQ ID NO: 3656 - protein, 18 aa, Artificial Sequence
  Non-cyclic GFR-binding peptide
  MOD_RES (14)..(15): Xaa is C or S
VKAVKVSRLQTPAXXPKP

SEQ ID NO: 3657 - protein, 16 aa, Artificial Sequence
  Non-cyclic GFR-binding peptide
  MOD_RES (14)..(15): Xaa is C or S
MIQITINSLDQPVXXP

SEQ ID NO: 3658 - protein, 14 aa, Artificial Sequence
  Non-cyclic GFR-binding peptide
YYVVPLPEHHVRSP

SEQ ID NO: 3659 - protein, 17 aa, Artificial Sequence
  Non-cyclic GFR-binding peptide
  MOD_RES (14)..(14): Xaa is C or S
MIQVTINSLKTPAXTPK

SEQ ID NO: 3660 - protein, 20 aa, Artificial Sequence
  Non-cyclic GFR-binding peptide
  MOD_RES (14)..(15): Xaa is C or S
MIQITINSLDQSVXXPSASA

SEQ ID NO: 3661 - protein, 20 aa, Artificial Sequence
  Non-cyclic GFR-binding peptide
  MOD_RES (14)..(14): Xaa is C or S
IKRVQVPRLKTPAXTPKTVH

SEQ ID NO: 3662 - protein, 16 aa, Artificial Sequence
  Non-cyclic GFR-binding peptide
  MOD_RES (14)..(15): Xaa is C or S
IKRVQVPRLQTPAXXP

SEQ ID NO: 3663 - protein, 15 aa, Artificial Sequence
  Non-cyclic GFR-binding peptide
  MOD_RES (14)..(15): Xaa is C or S
MIQITINSLDQSVXX

SEQ ID NO: 3664 - protein, 16 aa, Artificial Sequence
  Non-cyclic GFR-binding peptide
  MOD_RES (14)..(14): Xaa is C or S
YYVMPLPEEETPVXEL

SEQ ID NO: 3665 - protein, 17 aa, Artificial Sequence
  Non-cyclic GFR-binding peptide
  MOD_RES (16)..(16): Xaa is C or S
YYVVPLPELQVQTPRXQ

SEQ ID NO: 3666 - protein, 15 aa, Artificial Sequence
  Non-cyclic GFR-binding peptide
  MOD_RES (14)..(14): Xaa is C or S
IKRVQVPRLKTPAXT

SEQ ID NO: 3667 - protein, 14 aa, Artificial Sequence
  Non-cyclic GFR-binding peptide
  MOD_RES (14)..(14): Xaa is C or S
VKAIKVSRLDQPVX

SEQ ID NO: 3668 - protein, 13 aa, Artificial Sequence
  Non-cyclic GFR-binding peptide
MIQITINSLAQPV

SEQ ID NO: 3669 - protein, 10 aa, Artificial Sequence
  Non-cyclic GFR-binding peptide
YYVMPLPEEE

SEQ ID NO: 3670 - protein, 10 aa, Artificial Sequence
  Non-cyclic GFR-binding peptide
YYVVPLPEHH

SEQ ID NO: 3671 - protein, 14 aa, Artificial Sequence
  Non-cyclic GFR-binding peptide
  MOD_RES (14)..(14): Xaa is C or S
IKRVQVPRLQTPAX

SEQ ID NO: 3672 - protein, 19 aa, Artificial Sequence
  Non-cyclic GFR-binding peptide
  MOD_RES (14)..(15): Xaa is C or S
IKRIQVPRLAQPVXXPAAS

SEQ ID NO: 3673 - protein, 18 aa, Artificial Sequence
  Non-cyclic GFR-binding peptide
  MOD_RES (14)..(14): Xaa is C or S
MIQVTINSLKTPAXTPKT

SEQ ID NO: 3674 - protein, 11 aa, Artificial Sequence
  Non-cyclic GFR-binding peptide
VKAVKVSRLQT

SEQ ID NO: 3675 - protein, 15 aa, Artificial Sequence
  Non-cyclic GFR-binding peptide
  MOD_RES (14)..(15): Xaa is C or S
MIQITINSLDQPVXX

SEQ ID NO: 3676 - protein, 13 aa, Artificial Sequence
  Non-cyclic GFR-binding peptide
IKRVQVPRLKTPA

SEQ ID NO: 3677 - protein, 11 aa, Artificial Sequence
  Non-cyclic GFR-binding peptide
IKRMQVPRLET

SEQ ID NO: 3678 - protein, 13 aa, Artificial Sequence
  Non-cyclic GFR-binding peptide
MIQVTINSLQTPA

SEQ ID NO: 3679 - protein, 13 aa, Artificial Sequence
  Non-cyclic GFR-binding peptide
YYLVTLPELQVQT

SEQ ID NO: 3680 - protein, 15 aa, Artificial Sequence
  Non-cyclic GFR-binding peptide
  MOD_RES (14)..(15): Xaa is C or S
VKAMKVSRLETPVXX

SEQ ID NO: 3681 - protein, 9 aa, Artificial Sequence
  Non-cyclic GFR-binding peptide
YYVVPLPEH

SEQ ID NO: 3682 - protein, 20 aa, Artificial Sequence
  Non-cyclic GFR-binding peptide
  MOD_RES (14)..(15): Xaa is C or S
IKRMQVPRLETPVXXAKPIS

SEQ ID NO: 3683 - protein, 17 aa, Artificial Sequence
  Non-cyclic GFR-binding peptide
  MOD_RES (14)..(14): Xaa is C or S
IKRVQVPRLKTPAXTPK

SEQ ID NO: 3684 - protein, 12 aa, Artificial Sequence
  Non-cyclic GFR-binding peptide
MIQITINSLDQS

SEQ ID NO: 3685 - protein, 16 aa, Artificial Sequence
  Non-cyclic GFR-binding peptide
  MOD_RES (14)..(15): Xaa is C or S
IKRMQVPRLETPVXXA

SEQ ID NO: 3686 - protein, 14 aa, Artificial Sequence
  Non-cyclic GFR-binding peptide
YYLVTLPELQVQTP

SEQ ID NO: 3687 - protein, 15 aa, Artificial Sequence
  Non-cyclic GFR-binding peptide
  MOD_RES (14)..(15): Xaa is C or S
IKRVQVPRLKTPAXX

SEQ ID NO: 3688 - protein, 10 aa, Artificial Sequence
  Non-cyclic GFR-binding peptide
MIQITINSLA

SEQ ID NO: 3689 - protein, 19 aa, Artificial Sequence
  Non-cyclic GFR-binding peptide
  MOD_RES (16)..(16): Xaa is C or S
YYVVPLPELQVQTPRXQVN

SEQ ID NO: 3690 - protein, 13 aa, Artificial Sequence
  Non-cyclic GFR-binding peptide
YYVVPLPELQVQT

SEQ ID NO: 3691 - protein, 17 aa, Artificial Sequence
  Non-cyclic GFR-binding peptide
  MOD_RES (14)..(15): Xaa is C or S
MIQVTINSLQTPAXXPK

SEQ ID NO: 3692 - protein, 19 aa, Artificial Sequence
  Non-cyclic GFR-binding peptide
  MOD_RES (14)..(14): Xaa is C or S
MIQVTINSLKTPAXTPKTV

SEQ ID NO: 3693 - protein, 19 aa, Artificial Sequence
  Non-cyclic GFR-binding peptide
  MOD_RES (14)..(15): Xaa is C or S
VKAVKVSRLKTPAXXPKPV

SEQ ID NO: 3694 - protein, 20 aa, Artificial Sequence
  Non-cyclic GFR-binding peptide
  MOD_RES (14)..(15): Xaa is C or S
VKAIKVSRLDQSVXXPSASA

SEQ ID NO: 3695 - protein, 12 aa, Artificial Sequence
  Non-cyclic GFR-binding peptide
IKRIQVPRLAQP

SEQ ID NO: 3696 - protein, 14 aa, Artificial Sequence
  Non-cyclic GFR-binding peptide
  MOD_RES (14)..(14): Xaa is C or S
IKRIQVPRLAQPVX

SEQ ID NO: 3697 - protein, 18 aa, Artificial Sequence
  Non-cyclic GFR-binding peptide
  MOD_RES (14)..(15): Xaa is C or S
IKRMQVPRLETPVXXAKP

SEQ ID NO: 3698 - protein, 20 aa, Artificial Sequence
  Non-cyclic GFR-binding peptide
  MOD_RES (14)..(15): Xaa is C or S
MIQMTINSLETPVXXAKPIK

SEQ ID NO: 3699 - protein, 18 aa, Artificial Sequence
  Non-cyclic GFR-binding peptide
  MOD_RES (14)..(15): Xaa is C or S
IKRIQVPRLDQSVXXPSA

SEQ ID NO: 3700 - protein, 15 aa, Artificial Sequence
  Non-cyclic GFR-binding peptide
  MOD_RES (14)..(15): Xaa is C or S
MIQVTINSLKTPAXX

SEQ ID NO: 3701 - protein, 20 aa, Artificial Sequence
  Non-cyclic GFR-binding peptide
  MOD_RES (14)..(15): Xaa is C or S
IKRIQVPRLDQSVXXPSASA

SEQ ID NO: 3702 - protein, 13 aa, Artificial Sequence
  Non-cyclic GFR-binding peptide
MIQITINSLDQPV

SEQ ID NO: 3703 - protein, 11 aa, Artificial Sequence
  Non-cyclic GFR-binding peptide
YYVVPLPELQV

SEQ ID NO: 3704 - protein, 20 aa, Artificial Sequence
  Non-cyclic GFR-binding peptide
  MOD_RES (16)..(16): Xaa is C or S
YYVVPLPELQVQTPRXQVNR

SEQ ID NO: 3705 - protein, 19 aa, Artificial Sequence
  Non-cyclic GFR-binding peptide
  MOD_RES (14)..(15): Xaa is C or S
IKRVQVPRLKTPAXXPKPV

SEQ ID NO: 3706 - protein, 17 aa, Artificial Sequence
  Non-cyclic GFR-binding peptide
  MOD_RES (14)..(14): Xaa is C or S
VKAVKVSRLKTPAXTPK

SEQ ID NO: 3707 - protein, 20 aa, Artificial Sequence
  Non-cyclic GFR-binding peptide
  MOD_RES (14)..(15): Xaa is C or S
VKAVKVSRLQTPAXXPKPVT

SEQ ID NO: 3708 - protein, 9 aa, Artificial Sequence
  Non-cyclic GFR-binding peptide
MIQITINSL

SEQ ID NO: 3709 - protein, 18 aa, Artificial Sequence
  Non-cyclic GFR-binding peptide
  MOD_RES (14)..(15): Xaa is C or S
VKAIKVSRLDQPVXXPSA

SEQ ID NO: 3710 - protein, 12 aa, Artificial Sequence
  Non-cyclic GFR-binding peptide
IKRIQVPRLDQP

SEQ ID NO: 3711 - protein, 11 aa, Artificial Sequence
  Non-cyclic GFR-binding peptide
IKRVQVPRLKT

SEQ ID NO: 3712 - protein, 16 aa, Artificial Sequence
  Non-cyclic GFR-binding peptide
  MOD_RES (14)..(14): Xaa is C or S
YYLMTLPEEETPVXEL

SEQ ID NO: 3713 - protein, 20 aa, Artificial Sequence
  Non-cyclic GFR-binding peptide
  MOD_RES (14)..(15): Xaa is C or S
IKRMQVPRLETPVXXAKPIK

SEQ ID NO: 3714 - protein, 18 aa, Artificial Sequence
  Non-cyclic GFR-binding peptide
  MOD_RES (14)..(15): Xaa is C or S
MIQITINSLDQSVXXPSA

SEQ ID NO: 3715 - protein, 14 aa, Artificial Sequence
  Non-cyclic GFR-binding peptide
  MOD_RES (14)..(14): Xaa is C or S
VKAVKVSRLQTPAX

SEQ ID NO: 3716 - protein, 15 aa, Artificial Sequence
  Non-cyclic GFR-binding peptide
  MOD_RES (14)..(15): Xaa is C or S
MIQITINSLAQPVXX

SEQ ID NO: 3717 - protein, 14 aa, Artificial Sequence
  Non-cyclic GFR-binding peptide
  MOD_RES (14)..(14): Xaa is C or S
IKRIQVPRLDQPVX

SEQ ID NO: 3718 - protein, 18 aa, Artificial Sequence
  Non-cyclic GFR-binding peptide
  MOD_RES (14)..(15): Xaa is C or S
MIQVTINSLKTPAXXPKP

SEQ ID NO: 3719 - protein, 15 aa, Artificial Sequence
  Non-cyclic GFR-binding peptide
YYVVPLPELQVQTPR

SEQ ID NO: 3720 - protein, 12 aa, Artificial Sequence
  Non-cyclic GFR-binding peptide
MIQITINSLAQP

SEQ ID NO: 3721 - protein, 18 aa, Artificial Sequence
  Non-cyclic GFR-binding peptide
  MOD_RES (14)..(15): Xaa is C or S
VKAMKVSRLETPVXXAKP

SEQ ID NO: 3722 - protein, 19 aa, Artificial Sequence
  Non-cyclic GFR-binding peptide
  MOD_RES (14)..(15): Xaa is C or S
VKAIKVSRLAQPVXXPAAS

SEQ ID NO: 3723 - protein, 16 aa, Artificial Sequence
  Non-cyclic GFR-binding peptide
  MOD_RES (16)..(16): Xaa is C or S
YYLVTLPELQVQTPRX

SEQ ID NO: 3724 - protein, 14 aa, Artificial Sequence
  Non-cyclic GFR-binding peptide
  MOD_RES (14)..(14): Xaa is C or S
MIQITINSLDQSVX

SEQ ID NO: 3725 - protein, 15 aa, Artificial Sequence
  Non-cyclic GFR-binding peptide
  MOD_RES (14)..(14): Xaa is C or S
YYVMPLPEEETPVXE

SEQ ID NO: 3726 - protein, 17 aa, Artificial Sequence
  Non-cyclic GFR-binding peptide
  MOD_RES (14)..(15): Xaa is C or S
IKRMQVPRLETPVXXAK

SEQ ID NO: 3727 - protein, 18 aa, Artificial Sequence
  Non-cyclic GFR-binding peptide
  MOD_RES (14)..(15): Xaa is C or S
IKRVQVPRLQTPAXXPKP

SEQ ID NO: 3728 - protein, 17 aa, Artificial Sequence
  Non-cyclic GFR-binding peptide
  MOD_RES (16)..(16): Xaa is C or S
YYLVTLPEHHVRSPQXK

SEQ ID NO: 3729 - protein, 15 aa, Artificial Sequence
  Non-cyclic GFR-binding peptide
  MOD_RES (14)..(15): Xaa is C or S
IKRVQVPRLQTPAXX

SEQ ID NO: 3730 - protein, 10 aa, Artificial Sequence
  Non-cyclic GFR-binding peptide
YYLMTLPEEE

SEQ ID NO: 3731 - protein, 9 aa, Artificial Sequence
  Non-cyclic GFR-binding peptide
YYLVTLPEH

SEQ ID NO: 3732 - protein, 13 aa, Artificial Sequence
  Non-cyclic GFR-binding peptide
VKAMKVSRLETPV

SEQ ID NO: 3733 - protein, 17 aa, Artificial Sequence
  Non-cyclic GFR-binding peptide
  MOD_RES (14)..(15): Xaa is C or S
MIQVTINSLKTPAXXPK

SEQ ID NO: 3734 - protein, 10 aa, Artificial Sequence
  Non-cyclic GFR-binding peptide
MIQITINSLD

SEQ ID NO: 3735 - protein, 19 aa, Artificial Sequence
  Non-cyclic GFR-binding peptide
  MOD_RES (16)..(16): Xaa is C or S
YYLVTLPEHHVRSPQXKVS

SEQ ID NO: 3736 - protein, 20 aa, Artificial Sequence
  Non-cyclic GFR-binding peptide
  MOD_RES (14)..(15): Xaa is C or S
VKAMKVSRLETPVXXAKPIS

SEQ ID NO: 3737 - protein, 16 aa, Artificial Sequence
  Non-cyclic GFR-binding peptide
  MOD_RES (14)..(15): Xaa is C or S
MIQVTINSLQTPAXXP

SEQ ID NO: 3738 - protein, 20 aa, Artificial Sequence
  Non-cyclic GFR-binding peptide
  MOD_RES (14)..(14): Xaa is C or S
MIQVTINSLKTPAXTPKTVH

SEQ ID NO: 3739 - protein, 19 aa, Artificial Sequence
  Non-cyclic GFR-binding peptide
  MOD_RES (16)..(16): Xaa is C or S
YYLVTLPELQVQTPRXQVN

SEQ ID NO: 3740 - protein, 14 aa, Artificial Sequence
  Non-cyclic GFR-binding peptide
  MOD_RES (14)..(14): Xaa is C or S
IKRVQVPRLKTPAX

SEQ ID NO: 3741 - protein, 11 aa, Artificial Sequence
  Non-cyclic GFR-binding peptide
QDLSNITIQIM

SEQ ID NO: 3742 - protein, 15 aa, Artificial Sequence
  Non-cyclic GFR-binding peptide
  MOD_RES (1)..(2): Xaa is C or S
XXVSQDLRSVKIAKV

SEQ ID NO: 3743 - protein, 10 aa, Artificial Sequence
  Non-cyclic GFR-binding peptide
KLSNITVQIM

SEQ ID NO: 3744 - protein, 15 aa, Artificial Sequence
  Non-cyclic GFR-binding peptide
  MOD_RES (2)..(2): Xaa is C or S
TXAPTKLRSVKVAKV

SEQ ID NO: 3745 - protein, 20 aa, Artificial Sequence
  Non-cyclic GFR-binding peptide
  MOD_RES (6)..(7): Xaa is C or S
YVPKPXXAPTKLRSVKVAKV

SEQ ID NO: 3746 - protein, 12 aa, Artificial Sequence
  Non-cyclic GFR-binding peptide
PTELRSVKMAKV

SEQ ID NO: 3747 - protein, 9 aa, Artificial Sequence
  Non-cyclic GFR-binding peptide
LRSVKMAKV

SEQ ID NO: 3748 - protein, 19 aa, Artificial Sequence
  Non-cyclic GFR-binding peptide
  MOD_RES (6)..(6): Xaa is C or S
VTKPTXAPTKLRPVQVRKI

SEQ ID NO: 3749 - protein, 20 aa, Artificial Sequence
  Non-cyclic GFR-binding peptide
  MOD_RES (6)..(7): Xaa is C or S
ASAAPXXVPQALSNITIQIM

SEQ ID NO: 3750 - protein, 19 aa, Artificial Sequence
  Non-cyclic GFR-binding peptide
  MOD_RES (5)..(6): Xaa is C or S
VPKPXXAPTQLRSVKVAKV

SEQ ID NO: 3751 - protein, 11 aa, Artificial Sequence
  Non-cyclic GFR-binding peptide
TELSNITMQIM

SEQ ID NO: 3752 - protein, 16 aa, Artificial Sequence
  Non-cyclic GFR-binding peptide
  MOD_RES (2)..(3): Xaa is C or S
PXXVSQDLRSVKIAKV

SEQ ID NO: 3753 - protein, 9 aa, Artificial Sequence
  Non-cyclic GFR-binding peptide
LRPVQIRKI

SEQ ID NO: 3754 - protein, 20 aa, Artificial Sequence
  Non-cyclic GFR-binding peptide
  MOD_RES (7)..(7): Xaa is C or S
HVTKPTXAPTKLRSVKVAKV

SEQ ID NO: 3755 - protein, 12 aa, Artificial Sequence
  Non-cyclic GFR-binding peptide
PTKLRSVKVAKV

SEQ ID NO: 3756 - protein, 13 aa, Artificial Sequence
  Non-cyclic GFR-binding peptide
APTKLRSVKVAKV

SEQ ID NO: 3757 - protein, 11 aa, Artificial Sequence
  Non-cyclic GFR-binding peptide
VQLEPLTVLYY

SEQ ID NO: 3758 - protein, 17 aa, Artificial Sequence
  Non-cyclic GFR-binding peptide
  MOD_RES (3)..(4): Xaa is C or S
APXXVPQALRPVQIRKI

SEQ ID NO: 3759 - protein, 15 aa, Artificial Sequence
  Non-cyclic GFR-binding peptide
RPTQVQLEPLTVLYY

SEQ ID NO: 3760 - protein, 18 aa, Artificial Sequence
  Non-cyclic GFR-binding peptide
  MOD_RES (4)..(5): Xaa is C or S
PKPXXAPTQLSNITVQIM

SEQ ID NO: 3761 - protein, 14 aa, Artificial Sequence
  Non-cyclic GFR-binding peptide
  MOD_RES (1)..(1): Xaa is C or S
XVPTELSNITMQIM

SEQ ID NO: 3762 - protein, 13 aa, Artificial Sequence
  Non-cyclic GFR-binding peptide
VSQDLRSVKIAKV

SEQ ID NO: 3763 - protein, 14 aa, Artificial Sequence
  Non-cyclic GFR-binding peptide
  MOD_RES (1)..(1): Xaa is C or S
XVPQDLSNITIQIM

SEQ ID NO: 3764 - protein, 18 aa, Artificial Sequence
  Non-cyclic GFR-binding peptide
  MOD_RES (5)..(5): Xaa is C or S
TKPTXAPTKLRPVQVRKI

SEQ ID NO: 3765 - protein, 14 aa, Artificial Sequence
  Non-cyclic GFR-binding peptide
  MOD_RES (1)..(1): Xaa is C or S
XVPTEEEPLTMLYY

SEQ ID NO: 3766 - protein, 14 aa, Artificial Sequence
  Non-cyclic GFR-binding peptide
  MOD_RES (1)..(1): Xaa is C or S
XVPTELRPVQMRKI

SEQ ID NO: 3767 - protein, 17 aa, Artificial Sequence
  Non-cyclic GFR-binding peptide
  MOD_RES (3)..(4): Xaa is C or S
KPXXAPTQLRPVQVRKI

SEQ ID NO: 3768 - protein, 17 aa, Artificial Sequence
  Non-cyclic GFR-binding peptide
  MOD_RES (3)..(4): Xaa is C or S
KPXXAPTKLRPVQVRKI

SEQ ID NO: 3769 - protein, 17 aa, Artificial Sequence
  Non-cyclic GFR-binding peptide
  MOD_RES (2)..(2): Xaa is C or S
KXQPSRVHHEPLPVVYY

SEQ ID NO: 3770 - protein, 20 aa, Artificial Sequence
  Non-cyclic GFR-binding peptide
  MOD_RES (6)..(7): Xaa is C or S
ASASPXXVPQDLRPVQIRKI

SEQ ID NO: 3771 - protein, 11 aa, Artificial Sequence
  Non-cyclic GFR-binding peptide
TQLRPVQVRKI

SEQ ID NO: 3772 - protein, 17 aa, Artificial Sequence
  Non-cyclic GFR-binding peptide
  MOD_RES (3)..(4): Xaa is C or S
APXXVPQALSNITIQIM

SEQ ID NO: 3773 - protein, 16 aa, Artificial Sequence
  Non-cyclic GFR-binding peptide
  MOD_RES (2)..(3): Xaa is C or S
PXXVPQALRSVKIAKV

SEQ ID NO: 3774 - protein, 18 aa, Artificial Sequence
  Non-cyclic GFR-binding peptide
  MOD_RES (4)..(5): Xaa is C or S
PKAXXVPTELSNITMQIM

SEQ ID NO: 3775 - protein, 17 aa, Artificial Sequence
  Non-cyclic GFR-binding peptide
  MOD_RES (3)..(4): Xaa is C or S
KAXXVPTELSNITMQIM

SEQ ID NO: 3776 - protein, 12 aa, Artificial Sequence
  Non-cyclic GFR-binding peptide
PTQLSNITVQIM

SEQ ID NO: 3777 - protein, 17 aa, Artificial Sequence
  Non-cyclic GFR-binding peptide
  MOD_RES (3)..(4): Xaa is C or S
SPXXVSQDLRSVKIAKV

SEQ ID NO: 3778 - protein, 13 aa, Artificial Sequence
  Non-cyclic GFR-binding peptide
VPTELRPVQMRKI

SEQ ID NO: 3779 - protein, 20 aa, Artificial Sequence
  Non-cyclic GFR-binding peptide
  MOD_RES (6)..(7): Xaa is C or S
ASAAPXXVPQALRPVQIRKI

SEQ ID NO: 3780 - protein, 15 aa, Artificial Sequence
  Non-cyclic GFR-binding peptide
  MOD_RES (1)..(2): Xaa is C or S
XXAPTKLRSVKVAKV

SEQ ID NO: 3781 - protein, 10 aa, Artificial Sequence
  Non-cyclic GFR-binding peptide
ELSNITMQIM

SEQ ID NO: 3782 - protein, 19 aa, Artificial Sequence
  Non-cyclic GFR-binding peptide
  MOD_RES (5)..(6): Xaa is C or S
SASPXXVSQDLRSVKIAKV

SEQ ID NO: 3783 - protein, 14 aa, Artificial Sequence
  Non-cyclic GFR-binding peptide
  MOD_RES (1)..(1): Xaa is C or S
XVPTEEEPLPMVYY

SEQ ID NO: 3784 - protein, 19 aa, Artificial Sequence
  Non-cyclic GFR-binding peptide
  MOD_RES (5)..(6): Xaa is C or S
IPKAXXVPTELRSVKMAKV

SEQ ID NO: 3785 - protein, 20 aa, Artificial Sequence
  Non-cyclic GFR-binding peptide
  MOD_RES (7)..(7): Xaa is C or S
NDEGLEXVPTEEEPLTMLYY

SEQ ID NO: 3786 - protein, 14 aa, Artificial Sequence
  Non-cyclic GFR-binding peptide
  MOD_RES (1)..(1): Xaa is C or S
XVPQALRSVKIAKV

SEQ ID NO: 3787 - protein, 15 aa, Artificial Sequence
  Non-cyclic GFR-binding peptide
  MOD_RES (1)..(2): Xaa is C or S
XXVPTELRPVQMRKI

SEQ ID NO: 3788 - protein, 14 aa, Artificial Sequence
  Non-cyclic GFR-binding peptide
  MOD_RES (1)..(1): Xaa is C or S
XVSQDLRPVQIRKI

SEQ ID NO: 3789 - protein, 15 aa, Artificial Sequence
  Non-cyclic GFR-binding peptide
  MOD_RES (2)..(2): Xaa is C or S
EXVPTEEEPLTMLYY

SEQ ID NO: 3790 - protein, 16 aa, Artificial Sequence
  Non-cyclic GFR-binding peptide
  MOD_RES (2)..(3): Xaa is C or S
AXXVPTELRSVKMAKV

SEQ ID NO: 3791 - protein, 14 aa, Artificial Sequence
  Non-cyclic GFR-binding peptide
  MOD_RES (1)..(1): Xaa is C or S
XAPTKLSNITVQIM

SEQ ID NO: 3792 - protein, 13 aa, Artificial Sequence
  Non-cyclic GFR-binding peptide
APTQLRSVKVAKV

SEQ ID NO: 3793 - protein, 15 aa, Artificial Sequence
  Non-cyclic GFR-binding peptide
  MOD_RES (1)..(2): Xaa is C or S
XXAPTQLRSVKVAKV

SEQ ID NO: 3794 - protein, 16 aa, Artificial Sequence
  Non-cyclic GFR-binding peptide
  MOD_RES (1)..(1): Xaa is C or S
XRPTQVQLEPLPVVYY

SEQ ID NO: 3795 - protein, 17 aa, Artificial Sequence
  Non-cyclic GFR-binding peptide
  MOD_RES (3)..(4): Xaa is C or S
SPXXVPQDLSNITIQIM

SEQ ID NO: 3796 - protein, 10 aa, Artificial Sequence
  Non-cyclic GFR-binding peptide
DLRPVQIRKI

SEQ ID NO: 3797 - protein, 12 aa, Artificial Sequence
  Non-cyclic GFR-binding peptide
QVQLEPLTVLYY

SEQ ID NO: 3798 - protein, 11 aa, Artificial Sequence
  Non-cyclic GFR-binding peptide
TKLSNITVQIM

SEQ ID NO: 3799 - protein, 13 aa, Artificial Sequence
  Non-cyclic GFR-binding peptide
VPQDLRPVQIRKI

SEQ ID NO: 3800 - protein, 12 aa, Artificial Sequence
  Non-cyclic GFR-binding peptide
PQDLRSVKIAKV

SEQ ID NO: 3801 - protein, 15 aa, Artificial Sequence
  Non-cyclic GFR-binding peptide
  MOD_RES (1)..(2): Xaa is C or S
XXVPQDLRPVQIRKI

SEQ ID NO: 3802 - protein, 15 aa, Artificial Sequence
  Non-cyclic GFR-binding peptide
  MOD_RES (1)..(2): Xaa is C or S
XXVPTELSNITMQIM

SEQ ID NO: 3803 - protein, 20 aa, Artificial Sequence
  Non-cyclic GFR-binding peptide
  MOD_RES (6)..(7): Xaa is C or S
KIPKAXXVPTELRSVKMAKV

SEQ ID NO: 3804 - protein, 13 aa, Artificial Sequence
  Non-cyclic GFR-binding peptide
VPTEEEPLTMLYY

SEQ ID NO: 3805 - protein, 12 aa, Artificial Sequence
  Non-cyclic GFR-binding peptide
SQDLRSVKIAKV

SEQ ID NO: 3806 - protein, 16 aa, Artificial Sequence
  Non-cyclic GFR-binding peptide
  MOD_RES (2)..(3): Xaa is C or S
PXXVPQDLRSVKIAKV

SEQ ID NO: 3807 - protein, 19 aa, Artificial Sequence
  Non-cyclic GFR-binding peptide
  MOD_RES (6)..(6): Xaa is C or S
DEGLEXVPTEEEPLTMLYY

SEQ ID NO: 3808 - protein, 17 aa, Artificial Sequence
  Non-cyclic GFR-binding peptide
  MOD_RES (3)..(4): Xaa is C or S
KPXXAPTQLRSVKVAKV

SEQ ID NO: 3809 - protein, 14 aa, Artificial Sequence
  Non-cyclic GFR-binding peptide
PTQVQLEPLPVVYY

SEQ ID NO: 3810 - protein, 15 aa, Artificial Sequence
  Non-cyclic GFR-binding peptide
  MOD_RES (1)..(2): Xaa is C or S
XXVPQDLRSVKIAKV

SEQ ID NO: 3811 - protein, 19 aa, Artificial Sequence
  Non-cyclic GFR-binding peptide
  MOD_RES (5)..(6): Xaa is C or S
IPKAXXVPTELRPVQMRKI

SEQ ID NO: 3812 - protein, 18 aa, Artificial Sequence
  Non-cyclic GFR-binding peptide
  MOD_RES (3)..(3): Xaa is C or S
VKXQPSRVHHEPLPVVYY

SEQ ID NO: 3813 - protein, 16 aa, Artificial Sequence
  Non-cyclic GFR-binding peptide
  MOD_RES (1)..(1): Xaa is C or S
XQPSRVHHEPLPVVYY

SEQ ID NO: 3814 - protein, 19 aa, Artificial Sequence
  Non-cyclic GFR-binding peptide
  MOD_RES (5)..(6): Xaa is C or S
SASPXXVSQDLSNITIQIM

SEQ ID NO: 3815 - protein, 12 aa, Artificial Sequence
  Non-cyclic GFR-binding peptide
RVHHEPLTVLYY

SEQ ID NO: 3816 - protein, 17 aa, Artificial Sequence
  Non-cyclic GFR-binding peptide
  MOD_RES (3)..(4): Xaa is C or S
SPXXVSQDLRPVQIRKI

SEQ ID NO: 3817 - protein, 18 aa, Artificial Sequence
  Non-cyclic GFR-binding peptide
  MOD_RES (5)..(5): Xaa is C or S
TKPTXAPTKLRSVKVAKV

SEQ ID NO: 3818 - protein, 10 aa, Artificial Sequence
  Non-cyclic GFR-binding peptide
KLRPVQVRKI

SEQ ID NO: 3819 - protein, 19 aa, Artificial Sequence
  Non-cyclic GFR-binding peptide
  MOD_RES (5)..(6): Xaa is C or S
SASPXXVPQDLRPVQIRKI

SEQ ID NO: 3820 - protein, 11 aa, Artificial Sequence
  Non-cyclic GFR-binding peptide
VHHEPLPVVYY

SEQ ID NO: 3821 - protein, 16 aa, Artificial Sequence
  Non-cyclic GFR-binding peptide
  MOD_RES (3)..(3): Xaa is C or S
PTXAPTKLRSVKVAKV

SEQ ID NO: 3822 - protein, 11 aa, Artificial Sequence
  Non-cyclic GFR-binding peptide
QDLRPVQIRKI

SEQ ID NO: 3823 - protein, 11 aa, Artificial Sequence
  Non-cyclic GFR-binding peptide
TEEEPLPMVYY

SEQ ID NO: 3824 - protein, 10 aa, Artificial Sequence
  Non-cyclic GFR-binding peptide
HHEPLTVLYY

SEQ ID NO: 3825 - protein, 11 aa, Artificial Sequence
  Non-cyclic GFR-binding peptide
TQLSNITVQIM

SEQ ID NO: 3826 - protein, 17 aa, Artificial Sequence
  Non-cyclic GFR-binding peptide
  MOD_RES (4)..(4): Xaa is C or S
GLEXVPTEEEPLTMLYY

SEQ ID NO: 3827 - protein, 18 aa, Artificial Sequence
  Non-cyclic GFR-binding peptide
  MOD_RES (5)..(5): Xaa is C or S
EGLEXVPTEEEPLTMLYY

SEQ ID NO: 3828 - protein, 18 aa, Artificial Sequence
  Non-cyclic GFR-binding peptide
  MOD_RES (4)..(5): Xaa is C or S
PKPXXAPTKLRSVKVAKV

SEQ ID NO: 3829 - protein, 15 aa, Artificial Sequence
  Non-cyclic GFR-binding peptide
QPSRVHHEPLTVLYY

SEQ ID NO: 3830 - protein, 16 aa, Artificial Sequence
  Non-cyclic GFR-binding peptide
  MOD_RES (2)..(3): Xaa is C or S
PXXAPTKLRPVQVRKI

SEQ ID NO: 3831 - protein, 13 aa, Artificial Sequence
  Non-cyclic GFR-binding peptide
VPQDLRSVKIAKV

SEQ ID NO: 3832 - protein, 10 aa, Artificial Sequence
  Non-cyclic GFR-binding peptide
DLRSVKIAKV

SEQ ID NO: 3833 - protein, 11 aa, Artificial Sequence
  Non-cyclic GFR-binding peptide
QALRSVKIAKV

SEQ ID NO: 3834 - protein, 20 aa, Artificial Sequence
  Non-cyclic GFR-binding peptide
  MOD_RES (6)..(7): Xaa is C or S
TVPKPXXAPTQLSNITVQIM

SEQ ID NO: 3835 - protein, 12 aa, Artificial Sequence
  Non-cyclic GFR-binding peptide
PTELRPVQMRKI

SEQ ID NO: 3836 - protein, 20 aa, Artificial Sequence
  Non-cyclic GFR-binding peptide
  MOD_RES (7)..(7): Xaa is C or S
NDEGLEXVPTEEEPLPMVYY

SEQ ID NO: 3837 - protein, 16 aa, Artificial Sequence
  Non-cyclic GFR-binding peptide
  MOD_RES (2)..(3): Xaa is C or S
PXXAPTKLRSVKVAKV

SEQ ID NO: 3838 - protein, 18 aa, Artificial Sequence
  Non-cyclic GFR-binding peptide
  MOD_RES (5)..(5): Xaa is C or S
EGLEXVPTEEEPLPMVYY

SEQ ID NO: 3839 - protein, 17 aa, Artificial Sequence
  Non-cyclic GFR-binding peptide
  MOD_RES (3)..(4): Xaa is C or S
SPXXVSQDLSNITIQIM

SEQ ID NO: 3840 - protein, 12 aa, Artificial Sequence
  Non-cyclic GFR-binding peptide
RVHHEPLPVVYY

SEQ ID NO: 3841 - protein, 16 aa, Artificial Sequence
  Non-cyclic GFR-binding peptide
  MOD_RES (3)..(3): Xaa is C or S
PTXAPTKLRPVQVRKI

SEQ ID NO: 3842 - protein, 14 aa, Artificial Sequence
  Non-cyclic GFR-binding peptide
PSRVHHEPLTVLYY

SEQ ID NO: 3843 - protein, 15 aa, Artificial Sequence
  Non-cyclic GFR-binding peptide
QPSRVHHEPLPVVYY

SEQ ID NO: 3844 - protein, 16 aa, Artificial Sequence
  Non-cyclic GFR-binding peptide
  MOD_RES (2)..(3): Xaa is C or S
PXXAPTQLRSVKVAKV

SEQ ID NO: 3845 - protein, 15 aa, Artificial Sequence
  Non-cyclic GFR-binding peptide
  MOD_RES (1)..(2): Xaa is C or S
XXVPQALRSVKIAKV

SEQ ID NO: 3846 - protein, 13 aa, Artificial Sequence
  Non-cyclic GFR-binding peptide
VPTELSNITMQIM

SEQ ID NO: 3847 - protein, 10 aa, Artificial Sequence
  Non-cyclic GFR-binding peptide
ALRSVKIAKV

SEQ ID NO: 3848 - protein, 15 aa, Artificial Sequence
  Non-cyclic GFR-binding peptide
  MOD_RES (1)..(2): Xaa is C or S
XXVSQDLRPVQIRKI

SEQ ID NO: 3849 - protein, 18 aa, Artificial Sequence
  Non-cyclic GFR-binding peptide
  MOD_RES (3)..(3): Xaa is C or S
VKXQPSRVHHEPLTVLYY

SEQ ID NO: 3850 - protein, 12 aa, Artificial Sequence
  Non-cyclic GFR-binding peptide
PTKLSNITVQIM

SEQ ID NO: 3851 - protein, 20 aa, Artificial Sequence
  Non-cyclic GFR-binding peptide
  MOD_RES (5)..(5): Xaa is C or S
SSVKXQPSRVHHEPLPVVYY

SEQ ID NO: 3852 - protein, 20 aa, Artificial Sequence
  Non-cyclic GFR-binding peptide
  MOD_RES (6)..(7): Xaa is C or S
YVPKPXXAPTKLRPVQVRKI

SEQ ID NO: 3853 - protein, 16 aa, Artificial Sequence
  Non-cyclic GFR-binding peptide
  MOD_RES (2)..(3): Xaa is C or S
PXXVPQDLRPVQIRKI

SEQ ID NO: 3854 - protein, 12 aa, Artificial Sequence
  Non-cyclic GFR-binding peptide
QVQLEPLPVVYY

SEQ ID NO: 3855 - protein, 11 aa, Artificial Sequence
  Non-cyclic GFR-binding peptide
TEEEPLTMLYY

SEQ ID NO: 3856 - protein, 12 aa, Artificial Sequence
  Non-cyclic GFR-binding peptide
PTQLRPVQVRKI

SEQ ID NO: 3857 - protein, 11 aa, Artificial Sequence
  Non-cyclic GFR-binding peptide
QALRPVQIRKI

SEQ ID NO: 3858 - protein, 14 aa, Artificial Sequence
  Non-cyclic GFR-binding peptide
  MOD_RES (1)..(1): Xaa is C or S
XVSQDLRSVKIAKV

SEQ ID NO: 3859 - protein, 20 aa, Artificial Sequence
  Non-cyclic GFR-binding peptide
  MOD_RES (6)..(7): Xaa is C or S
ASASPXXVPQDLSNITIQIM

SEQ ID NO: 3860 - protein, 19 aa, Artificial Sequence
  Non-cyclic GFR-binding peptide
  MOD_RES (5)..(6): Xaa is C or S
SAAPXXVPQALSNITIQIM

SEQ ID NO: 3861 - protein, 13 aa, Artificial Sequence
  Non-cyclic GFR-binding peptide
VSQDLRPVQIRKI

SEQ ID NO: 3862 - protein, 17 aa, Artificial Sequence
  Non-cyclic GFR-binding peptide
  MOD_RES (3)..(4): Xaa is C or S
SPXXVPQDLRPVQIRKI

SEQ ID NO: 3863 - protein, 19 aa, Artificial Sequence
  Non-cyclic GFR-binding peptide
  MOD_RES (6)..(6): Xaa is C or S
DEGLEXVPTEEEPLPMVYY

SEQ ID NO: 3864 - protein, 18 aa, Artificial Sequence
  Non-cyclic GFR-binding peptide
  MOD_RES (4)..(5): Xaa is C or S
AAPXXVPQALRSVKIAKV

SEQ ID NO: 3865 - protein, 13 aa, Artificial Sequence
  Non-cyclic GFR-binding peptide
VPTEEEPLPMVYY

SEQ ID NO: 3866 - protein, 13 aa, Artificial Sequence
  Non-cyclic GFR-binding peptide
VPQALRSVKIAKV

SEQ ID NO: 3867 - protein, 13 aa, Artificial Sequence
  Non-cyclic GFR-binding peptide
SRVHHEPLPVVYY

SEQ ID NO: 3868 - protein, 10 aa, Artificial Sequence
  Non-cyclic GFR-binding peptide
ELRPVQMRKI

SEQ ID NO: 3869 - protein, 16 aa, Artificial Sequence
  Non-cyclic GFR-binding peptide
  MOD_RES (1)..(1): Xaa is C or S
XQPSRVHHEPLTVLYY

SEQ ID NO: 3870 - protein, 9 aa, Artificial Sequence
  Non-cyclic GFR-binding peptide
EEPLPMVYY

SEQ ID NO: 3871 - protein, 19 aa, Artificial Sequence
  Non-cyclic GFR-binding peptide
  MOD_RES (5)..(6): Xaa is C or S
SASPXXVPQDLRSVKIAKV

SEQ ID NO: 3872 - protein, 17 aa, Artificial Sequence
  Non-cyclic GFR-binding peptide
  MOD_RES (4)..(4): Xaa is C or S
GLEXVPTEEEPLPMVYY

SEQ ID NO: 3873 - protein, 10 aa, Artificial Sequence
  Non-cyclic GFR-binding peptide
ALRPVQIRKI

SEQ ID NO: 3874 - protein, 16 aa, Artificial Sequence
  Non-cyclic GFR-binding peptide
  MOD_RES (2)..(3): Xaa is C or S
PXXVPQALRPVQIRKI

SEQ ID NO: 3875 - protein, 20 aa, Artificial Sequence
  Non-cyclic GFR-binding peptide
  MOD_RES (6)..(7): Xaa is C or S
SIPKAXXVPTELSNITMQIM

SEQ ID NO: 3876 - protein, 12 aa, Artificial Sequence
  Non-cyclic GFR-binding peptide
PTELSNITMQIM

SEQ ID NO: 3877 - protein, 20 aa, Artificial Sequence
  Non-cyclic GFR-binding peptide
  MOD_RES (6)..(7): Xaa is C or S
ASASPXXVPQDLRSVKIAKV

SEQ ID NO: 3878 - protein, 17 aa, Artificial Sequence
  Non-cyclic GFR-binding peptide
  MOD_RES (3)..(4): Xaa is C or S
KPXXAPTKLRSVKVAKV

SEQ ID NO: 3879 - protein, 19 aa, Artificial Sequence
  Non-cyclic GFR-binding peptide
  MOD_RES (5)..(6): Xaa is C or S
SASPXXVSQDLRPVQIRKI

SEQ ID NO: 3880 - protein, 9 aa, Artificial Sequence
  Non-cyclic GFR-binding peptide
LSNITMQIM

SEQ ID NO: 3881 - protein, 15 aa, Artificial Sequence
  Non-cyclic GFR-binding peptide
  MOD_RES (2)..(2): Xaa is C or S
TXAPTKLSNITVQIM

SEQ ID NO: 3882 - protein, 20 aa, Artificial Sequence
  Non-cyclic GFR-binding peptide
  MOD_RES (6)..(7): Xaa is C or S
ASAAPXXVPQALRSVKIAKV

SEQ ID NO: 3883 - protein, 13 aa, Artificial Sequence
  Non-cyclic GFR-binding peptide
APTQLRPVQVRKI

SEQ ID NO: 3884 - protein, 13 aa, Artificial Sequence
  Non-cyclic GFR-binding peptide
APTKLSNITVQIM

SEQ ID NO: 3885 - protein, 15 aa, Artificial Sequence
  Non-cyclic GFR-binding peptide
  MOD_RES (1)..(2): Xaa is C or S
XXVPQALRPVQIRKI

SEQ ID NO: 3886 - protein, 14 aa, Artificial Sequence
  Non-cyclic GFR-binding peptide
  MOD_RES (1)..(1): Xaa is C or S
XVPTELRSVKMAKV

SEQ ID NO: 3887 - protein, 11 aa, Artificial Sequence
  Non-cyclic GFR-binding peptide
QDLRSVKIAKV

SEQ ID NO: 3888 - protein, 14 aa, Artificial Sequence
  Non-cyclic GFR-binding peptide
  MOD_RES (1)..(1): Xaa is C or S
XVPQALSNITIQIM

SEQ ID NO: 3889 - protein, 20 aa, Artificial Sequence
  Non-cyclic GFR-binding peptide
  MOD_RES (6)..(7): Xaa is C or S
YVPKPXXAPTKLSNITVQIM

SEQ ID NO: 3890 - protein, 18 aa, Artificial Sequence
  Non-cyclic GFR-binding peptide
  MOD_RES (4)..(5): Xaa is C or S
ASPXXVPQDLRPVQIRKI

SEQ ID NO: 3891 - protein, 17 aa, Artificial Sequence
  Non-cyclic GFR-binding peptide
  MOD_RES (2)..(2): Xaa is C or S
QXRPTQVQLEPLTVLYY

SEQ ID NO: 3892 - protein, 18 aa, Artificial Sequence
  Non-cyclic GFR-binding peptide
  MOD_RES (3)..(3): Xaa is C or S
VQXRPTQVQLEPLTVLYY

SEQ ID NO: 3893 - protein, 16 aa, Artificial Sequence
  Non-cyclic GFR-binding peptide
  MOD_RES (2)..(3): Xaa is C or S
PXXVSQDLSNITIQIM

SEQ ID NO: 3894 - protein, 11 aa, Artificial Sequence
  Non-cyclic GFR-binding peptide
TELRSVKMAKV

SEQ ID NO: 3895 - protein, 20 aa, Artificial Sequence
  Non-cyclic GFR-binding peptide
  MOD_RES (5)..(5): Xaa is C or S
RNVQXRPTQVQLEPLTVLYY

SEQ ID NO: 3896 - protein, 18 aa, Artificial Sequence
  Non-cyclic GFR-binding peptide
  MOD_RES (4)..(5): Xaa is C or S
AAPXXVPQALRPVQIRKI

SEQ ID NO: 3897 - protein, 14 aa, Artificial Sequence
  Non-cyclic GFR-binding peptide
  MOD_RES (1)..(1): Xaa is C or S
XAPTQLSNITVQIM

SEQ ID NO: 3898 - protein, 19 aa, Artificial Sequence
  Non-cyclic GFR-binding peptide
  MOD_RES (5)..(6): Xaa is C or S
SASPXXVPQDLSNITIQIM

SEQ ID NO: 3899 - protein, 17 aa, Artificial Sequence
  Non-cyclic GFR-binding peptide
  MOD_RES (3)..(4): Xaa is C or S
APXXVPQALRSVKIAKV

SEQ ID NO: 3900 - protein, 13 aa, Artificial Sequence
  Non-cyclic GFR-binding peptide
SRVHHEPLTVLYY

SEQ ID NO: 3901 - protein, 16 aa, Artificial Sequence
  Non-cyclic GFR-binding peptide
  MOD_RES (2)..(3): Xaa is C or S
AXXVPTELSNITMQIM

SEQ ID NO: 3902 - protein, 19 aa, Artificial Sequence
  Non-cyclic GFR-binding peptide
  MOD_RES (5)..(6): Xaa is C or S
VPKPXXAPTQLSNITVQIM

SEQ ID NO: 3903 - protein, 17 aa, Artificial Sequence
  Non-cyclic GFR-binding peptide
  MOD_RES (3)..(4): Xaa is C or S
SPXXVPQDLRSVKIAKV

SEQ ID NO: 3904 - protein, 11 aa, Artificial Sequence
  Non-cyclic GFR-binding peptide
TKLRSVKVAKV

SEQ ID NO: 3905 - protein, 17 aa, Artificial Sequence
  Non-cyclic GFR-binding peptide
  MOD_RES (3)..(4): Xaa is C or S
KAXXVPTELRSVKMAKV

SEQ ID NO: 3906 - protein, 20 aa, Artificial Sequence
  Non-cyclic GFR-binding peptide
  MOD_RES (6)..(7): Xaa is C or S
TVPKPXXAPTQLRPVQVRKI

SEQ ID NO: 3907 - protein, 12 aa, Artificial Sequence
  Non-cyclic GFR-binding peptide
PTEEEPLTMLYY

SEQ ID NO: 3908 - protein, 12 aa, Artificial Sequence
  Non-cyclic GFR-binding peptide
PQDLSNITIQIM

SEQ ID NO: 3909 - protein, 16 aa, Artificial Sequence
  Non-cyclic GFR-binding peptide
  MOD_RES (2)..(3): Xaa is C or S
PXXAPTKLSNITVQIM

SEQ ID NO: 3910 - protein, 19 aa, Artificial Sequence
  Non-cyclic GFR-binding peptide
  MOD_RES (5)..(6): Xaa is C or S
VPKPXXAPTQLRPVQVRKI

SEQ ID NO: 3911 - protein, 20 aa, Artificial Sequence
  Non-cyclic GFR-binding peptide
  MOD_RES (5)..(5): Xaa is C or S
SSVKXQPSRVHHEPLTVLYY

SEQ ID NO: 3912 - protein, 11 aa, Artificial Sequence
  Non-cyclic GFR-binding peptide
QALSNITIQIM

SEQ ID NO: 3913 - protein, 15 aa, Artificial Sequence
  Non-cyclic GFR-binding peptide
  MOD_RES (1)..(2): Xaa is C or S
XXAPTQLSNITVQIM

SEQ ID NO: 3914 - protein, 16 aa, Artificial Sequence
  Non-cyclic GFR-binding peptide
  MOD_RES (2)..(3): Xaa is C or S
PXXVSQDLRPVQIRKI

SEQ ID NO: 3915 - protein, 12 aa, Artificial Sequence
  Non-cyclic GFR-binding peptide
PQALRSVKIAKV

SEQ ID NO: 3916 - protein, 18 aa, Artificial Sequence
  Non-cyclic GFR-binding peptide
  MOD_RES (4)..(5): Xaa is C or S
AAPXXVPQALSNITIQIM

SEQ ID NO: 3917 - protein, 19 aa, Artificial Sequence
  Non-cyclic GFR-binding peptide
  MOD_RES (6)..(6): Xaa is C or S
VTKPTXAPTKLRSVKVAKV

SEQ ID NO: 3918 - protein, 13 aa, Artificial Sequence
  Non-cyclic GFR-binding peptide
VSQDLSNITIQIM

SEQ ID NO: 3919 - protein, 18 aa, Artificial Sequence
  Non-cyclic GFR-binding peptide
  MOD_RES (3)..(3): Xaa is C or S
VQXRPTQVQLEPLPVVYY

SEQ ID NO: 3920 - protein, 18 aa, Artificial Sequence
  Non-cyclic GFR-binding peptide
  MOD_RES (4)..(5): Xaa is C or S
ASPXXVSQDLRSVKIAKV

SEQ ID NO: 3921 - protein, 12 aa, Artificial Sequence
  Non-cyclic GFR-binding peptide
SQDLRPVQIRKI

SEQ ID NO: 3922 - protein, 19 aa, Artificial Sequence
  Non-cyclic GFR-binding peptide
  MOD_RES (4)..(4): Xaa is C or S
SVKXQPSRVHHEPLPVVYY

SEQ ID NO: 3923 - protein, 9 aa, Artificial Sequence
  Non-cyclic GFR-binding peptide
LRSVKIAKV

SEQ ID NO: 3924 - protein, 12 aa, Artificial Sequence
  Non-cyclic GFR-binding peptide
PTKLRPVQVRKI

SEQ ID NO: 3925 - protein, 14 aa, Artificial Sequence
  Non-cyclic GFR-binding peptide
  MOD_RES (1)..(1): Xaa is C or S
XAPTKLRSVKVAKV

SEQ ID NO: 3926 - protein, 18 aa, Artificial Sequence
  Non-cyclic GFR-binding peptide
  MOD_RES (4)..(5): Xaa is C or S
ASPXXVPQDLSNITIQIM

SEQ ID NO: 3927 - protein, 18 aa, Artificial Sequence
  Non-cyclic GFR-binding peptide
  MOD_RES (4)..(5): Xaa is C or S
PKPXXAPTKLRPVQVRKI

SEQ ID NO: 3928 - protein, 16 aa, Artificial Sequence
  Non-cyclic GFR-binding peptide
  MOD_RES (3)..(3): Xaa is C or S
PTXAPTKLSNITVQIM

SEQ ID NO: 3929 - protein, 9 aa, Artificial Sequence
  Non-cyclic GFR-binding peptide
LRPVQMRKI

SEQ ID NO: 3930 - protein, 12 aa, Artificial Sequence
  Non-cyclic GFR-binding peptide
PTEEEPLPMVYY

SEQ ID NO: 3931 - protein, 10 aa, Artificial Sequence
  Non-cyclic GFR-binding peptide
ELRSVKMAKV

SEQ ID NO: 3932 - protein, 9 aa, Artificial Sequence
  Non-cyclic GFR-binding peptide
EEPLTMLYY

SEQ ID NO: 3933 - protein, 12 aa, Artificial Sequence
  Non-cyclic GFR-binding peptide
PTQLRSVKVAKV

SEQ ID NO: 3934 - protein, 19 aa, Artificial Sequence
  Non-cyclic GFR-binding peptide
  MOD_RES (5)..(6): Xaa is C or S
IPKAXXVPTELSNITMQIM

SEQ ID NO: 3935 - protein, 13 aa, Artificial Sequence
  Non-cyclic GFR-binding peptide
VPQALRPVQIRKI

SEQ ID NO: 3936 - protein, 11 aa, Artificial Sequence
  Non-cyclic GFR-binding peptide
VHHEPLTVLYY

SEQ ID NO: 3937 - protein, 10 aa, Artificial Sequence
  Non-cyclic GFR-binding peptide
KLRSVKVAKV

SEQ ID NO: 3938 - protein, 19 aa, Artificial Sequence
  Non-cyclic GFR-binding peptide
  MOD_RES (5)..(6): Xaa is C or S
VPKPXXAPTKLSNITVQIM

SEQ ID NO: 3939 - protein, 16 aa, Artificial Sequence
  Non-cyclic GFR-binding peptide
  MOD_RES (2)..(3): Xaa is C or S
PXXVPQALSNITIQIM

SEQ ID NO: 3940 - protein, 18 aa, Artificial Sequence
  Non-cyclic GFR-binding peptide
  MOD_RES (4)..(5): Xaa is C or S
PKPXXAPTQLRSVKVAKV

SEQ ID NO: 3941 - protein, 16 aa, Artificial Sequence
  Non-cyclic GFR-binding peptide
  MOD_RES (2)..(3): Xaa is C or S
PXXVPQDLSNITIQIM

SEQ ID NO: 3942 - protein, 14 aa, Artificial Sequence
  Non-cyclic GFR-binding peptide
PSRVHHEPLPVVYY

SEQ ID NO: 3943 - protein, 17 aa, Artificial Sequence
  Non-cyclic GFR-binding peptide
  MOD_RES (4)..(4): Xaa is C or S
KPTXAPTKLSNITVQIM

SEQ ID NO: 3944 - protein, 20 aa, Artificial Sequence
  Non-cyclic GFR-binding peptide
  MOD_RES (6)..(7): Xaa is C or S
ASASPXXVSQDLSNITIQIM

SEQ ID NO: 3945 - protein, 20 aa, Artificial Sequence
  Non-cyclic GFR-binding peptide
  MOD_RES (7)..(7): Xaa is C or S
HVTKPTXAPTKLRPVQVRKI

SEQ ID NO: 3946 - protein, 16 aa, Artificial Sequence
  Non-cyclic GFR-binding peptide
  MOD_RES (2)..(3): Xaa is C or S
PXXAPTQLRPVQVRKI

SEQ ID NO: 3947 - protein, 15 aa, Artificial Sequence
  Non-cyclic GFR-binding peptide
  MOD_RES (1)..(2): Xaa is C or S
XXVSQDLSNITIQIM

SEQ ID NO: 3948 - protein, 16 aa, Artificial Sequence
  Non-cyclic GFR-binding peptide
  MOD_RES (3)..(3): Xaa is C or S
LEXVPTEEEPLPMVYY

SEQ ID NO: 3949 - protein, 17 aa, Artificial Sequence
  Non-cyclic GFR-binding peptide
  MOD_RES (2)..(2): Xaa is C or S
QXRPTQVQLEPLPVVYY

SEQ ID NO: 3950 - protein, 15 aa, Artificial Sequence
  Non-cyclic GFR-binding peptide
  MOD_RES (2)..(2): Xaa is C or S
TXAPTKLRPVQVRKI

SEQ ID NO: 3951 - protein, 14 aa, Artificial Sequence
  Non-cyclic GFR-binding peptide
  MOD_RES (1)..(1): Xaa is C or S
XVPQDLRSVKIAKV

SEQ ID NO: 3952 - protein, 13 aa, Artificial Sequence
  Non-cyclic GFR-binding peptide
VPQALSNITIQIM

SEQ ID NO: 3953 - protein, 10 aa, Artificial Sequence
  Non-cyclic GFR-binding peptide
EEEPLPMVYY

SEQ ID NO: 3954 - protein, 10 aa, Artificial Sequence
  Non-cyclic GFR-binding peptide
HHEPLPVVYY

SEQ ID NO: 3955 - protein, 14 aa, Artificial Sequence
  Non-cyclic GFR-binding peptide
  MOD_RES (1)..(1): Xaa is C or S
XAPTQLRPVQVRKI

SEQ ID NO: 3956 - protein, 19 aa, Artificial Sequence
  Non-cyclic GFR-binding peptide
  MOD_RES (5)..(6): Xaa is C or S
SAAPXXVPQALRPVQIRKI

SEQ ID NO: 3957 - protein, 18 aa, Artificial Sequence
  Non-cyclic GFR-binding peptide
  MOD_RES (5)..(5): Xaa is C or S
TKPTXAPTKLSNITVQIM

SEQ ID NO: 3958 - protein, 11 aa, Artificial Sequence
  Non-cyclic GFR-binding peptide
TQLRSVKVAKV

SEQ ID NO: 3959 - protein, 15 aa, Artificial Sequence
  Non-cyclic GFR-binding peptide
  MOD_RES (1)..(2): Xaa is C or S
XXVPQDLSNITIQIM

SEQ ID NO: 3960 - protein, 13 aa, Artificial Sequence
  Non-cyclic GFR-binding peptide
APTKLRPVQVRKI

SEQ ID NO: 3961 - protein, 11 aa, Artificial Sequence
  Non-cyclic GFR-binding peptide
TELRPVQMRKI

SEQ ID NO: 3962 - protein, 13 aa, Artificial Sequence
  Non-cyclic GFR-binding peptide
APTQLSNITVQIM

SEQ ID NO: 3963 - protein, 13 aa, Artificial Sequence
  Non-cyclic GFR-binding peptide
TQVQLEPLTVLYY

SEQ ID NO: 3964 - protein, 15 aa, Artificial Sequence
  Non-cyclic GFR-binding peptide
  MOD_RES (1)..(2): Xaa is C or S
XXVPTELRSVKMAKV

SEQ ID NO: 3965 - protein, 9 aa, Artificial Sequence
  Non-cyclic GFR-binding peptide
HEPLPVVYY

SEQ ID NO: 3966 - protein, 20 aa, Artificial Sequence
  Non-cyclic GFR-binding peptide
  MOD_RES (6)..(7): Xaa is C or S
SIPKAXXVPTELRPVQMRKI

SEQ ID NO: 3967 - protein, 17 aa, Artificial Sequence
  Non-cyclic GFR-binding peptide
  MOD_RES (4)..(4): Xaa is C or S
KPTXAPTKLRPVQVRKI

SEQ ID NO: 3968 - protein, 12 aa, Artificial Sequence
  Non-cyclic GFR-binding peptide
SQDLSNITIQIM

SEQ ID NO: 3969 - protein, 16 aa, Artificial Sequence
  Non-cyclic GFR-binding peptide
  MOD_RES (2)..(3): Xaa is C or S
AXXVPTELRPVQMRKI

SEQ ID NO: 3970 - protein, 14 aa, Artificial Sequence
  Non-cyclic GFR-binding peptide
PTQVQLEPLTVLYY

SEQ ID NO: 3971 - protein, 15 aa, Artificial Sequence
  Non-cyclic GFR-binding peptide
  MOD_RES (1)..(2): Xaa is C or S
XXAPTKLRPVQVRKI

SEQ ID NO: 3972 - protein, 10 aa, Artificial Sequence
  Non-cyclic GFR-binding peptide
ALSNITIQIM

SEQ ID NO: 3973 - protein, 19 aa, Artificial Sequence
  Non-cyclic GFR-binding peptide
  MOD_RES (4)..(4): Xaa is C or S
NVQXRPTQVQLEPLPVVYY

SEQ ID NO: 3974 - protein, 13 aa, Artificial Sequence
  Non-cyclic GFR-binding peptide
TQVQLEPLPVVYY

SEQ ID NO: 3975 - protein, 17 aa, Artificial Sequence
  Non-cyclic GFR-binding peptide
  MOD_RES (3)..(4): Xaa is C or S
KPXXAPTQLSNITVQIM

SEQ ID NO: 3976 - protein, 19 aa, Artificial Sequence
  Non-cyclic GFR-binding peptide
  MOD_RES (6)..(6): Xaa is C or S
VTKPTXAPTKLSNITVQIM

SEQ ID NO: 3977 - protein, 19 aa, Artificial Sequence
  Non-cyclic GFR-binding peptide
  MOD_RES (5)..(6): Xaa is C or S
VPKPXXAPTKLRSVKVAKV

SEQ ID NO: 3978 - protein, 20 aa, Artificial Sequence
  Non-cyclic GFR-binding peptide
  MOD_RES (6)..(7): Xaa is C or S
ASASPXXVSQDLRSVKIAKV

SEQ ID NO: 3979 - protein, 12 aa, Artificial Sequence
  Non-cyclic GFR-binding peptide
PQALRPVQIRKI

SEQ ID NO: 3980 - protein, 14 aa, Artificial Sequence
  Non-cyclic GFR-binding peptide
  MOD_RES (1)..(1): Xaa is C or S
XVPQALRPVQIRKI

SEQ ID NO: 3981 - protein, 18 aa, Artificial Sequence
  Non-cyclic GFR-binding peptide
  MOD_RES (4)..(5): Xaa is C or S
PKAXXVPTELRPVQMRKI

SEQ ID NO: 3982 - protein, 20 aa, Artificial Sequence
  Non-cyclic GFR-binding peptide
  MOD_RES (6)..(7): Xaa is C or S
KIPKAXXVPTELSNITMQIM

SEQ ID NO: 3983 - protein, 18 aa, Artificial Sequence
  Non-cyclic GFR-binding peptide
  MOD_RES (4)..(5): Xaa is C or S
ASPXXVSQDLRPVQIRKI

SEQ ID NO: 3984 - protein, 15 aa, Artificial Sequence
  Non-cyclic GFR-binding peptide
  MOD_RES (1)..(2): Xaa is C or S
XXAPTKLSNITVQIM

SEQ ID NO: 3985 - protein, 20 aa, Artificial Sequence
  Non-cyclic GFR-binding peptide
  MOD_RES (6)..(7): Xaa is C or S
ASASPXXVSQDLRPVQIRKI

SEQ ID NO: 3986 - protein, 13 aa, Artificial Sequence
  Non-cyclic GFR-binding peptide
VPQDLSNITIQIM

SEQ ID NO: 3987 - protein, 11 aa, Artificial Sequence
  Non-cyclic GFR-binding peptide
VQLEPLPVVYY

SEQ ID NO: 3988 - protein, 20 aa, Artificial Sequence
  Non-cyclic GFR-binding peptide
  MOD_RES (5)..(5): Xaa is C or S
RNVQXRPTQVQLEPLPVVYY

SEQ ID NO: 3989 - protein, 19 aa, Artificial Sequence
  Non-cyclic GFR-binding peptide
  MOD_RES (5)..(6): Xaa is C or S
VPKPXXAPTKLRPVQVRKI

SEQ ID NO: 3990 - protein, 17 aa, Artificial Sequence
  Non-cyclic GFR-binding peptide
  MOD_RES (4)..(4): Xaa is C or S
KPTXAPTKLRSVKVAKV

SEQ ID NO: 3991 - protein, 20 aa, Artificial Sequence
  Non-cyclic GFR-binding peptide
  MOD_RES (6)..(7): Xaa is C or S
TVPKPXXAPTQLRSVKVAKV

SEQ ID NO: 3992 - protein, 9 aa, Artificial Sequence
  Non-cyclic GFR-binding peptide
LSNITIQIM

SEQ ID NO: 3993 - protein, 18 aa, Artificial Sequence
  Non-cyclic GFR-binding peptide
  MOD_RES (4)..(5): Xaa is C or S
ASPXXVPQDLRSVKIAKV

SEQ ID NO: 3994 - protein, 12 aa, Artificial Sequence
  Non-cyclic GFR-binding peptide
PQDLRPVQIRKI

SEQ ID NO: 3995 - protein, 11 aa, Artificial Sequence
  Non-cyclic GFR-binding peptide
TKLRPVQVRKI

SEQ ID NO: 3996 - protein, 16 aa, Artificial Sequence
  Non-cyclic GFR-binding peptide
  MOD_RES (3)..(3): Xaa is C or S
LEXVPTEEEPLTMLYY

SEQ ID NO: 3997 - protein, 20 aa, Artificial Sequence
  Non-cyclic GFR-binding peptide
  MOD_RES (6)..(7): Xaa is C or S
KIPKAXXVPTELRPVQMRKI

SEQ ID NO: 3998 - protein, 18 aa, Artificial Sequence
  Non-cyclic GFR-binding peptide
  MOD_RES (4)..(5): Xaa is C or S
ASPXXVSQDLSNITIQIM

SEQ ID NO: 3999 - protein, 14 aa, Artificial Sequence
  Non-cyclic GFR-binding peptide
  MOD_RES (1)..(1): Xaa is C or S
XAPTQLRSVKVAKV

SEQ ID NO: 4000 - protein, 15 aa, Artificial Sequence
  Non-cyclic GFR-binding peptide
  MOD_RES (1)..(2): Xaa is C or S
XXVPQALSNITIQIM

SEQ ID NO: 4001 - protein, 14 aa, Artificial Sequence
  Non-cyclic GFR-binding peptide
  MOD_RES (1)..(1): Xaa is C or S
XVPQDLRPVQIRKI

SEQ ID NO: 4002 - protein, 18 aa, Artificial Sequence
  Non-cyclic GFR-binding peptide
  MOD_RES (4)..(5): Xaa is C or S
PKPXXAPTKLSNITVQIM

SEQ ID NO: 4003 - protein, 15 aa, Artificial Sequence
  Non-cyclic GFR-binding peptide
RPTQVQLEPLPVVYY

SEQ ID NO: 4004 - protein, 12 aa, Artificial Sequence
  Non-cyclic GFR-binding peptide
PQALSNITIQIM

SEQ ID NO: 4005 - protein, 18 aa, Artificial Sequence
  Non-cyclic GFR-binding peptide
  MOD_RES (4)..(5): Xaa is C or S
PKAXXVPTELRSVKMAKV

SEQ ID NO: 4006 - protein, 19 aa, Artificial Sequence
  Non-cyclic GFR-binding peptide
  MOD_RES (5)..(6): Xaa is C or S
SAAPXXVPQALRSVKIAKV

SEQ ID NO: 4007 - protein, 16 aa, Artificial Sequence
  Non-cyclic GFR-binding peptide
  MOD_RES (1)..(1): Xaa is C or S
XRPTQVQLEPLTVLYY

SEQ ID NO: 4008 - protein, 14 aa, Artificial Sequence
  Non-cyclic GFR-binding peptide
  MOD_RES (1)..(1): Xaa is C or S
XVSQDLSNITIQIM

SEQ ID NO: 4009 - protein, 15 aa, Artificial Sequence
  Non-cyclic GFR-binding peptide
  MOD_RES (2)..(2): Xaa is C or S
EXVPTEEEPLPMVYY

SEQ ID NO: 4010 - protein, 17 aa, Artificial Sequence
  Non-cyclic GFR-binding peptide
  MOD_RES (3)..(4): Xaa is C or S
KAXXVPTELRPVQMRKI

SEQ ID NO: 4011 - protein, 18 aa, Artificial Sequence
  Non-cyclic GFR-binding peptide
  MOD_RES (4)..(5): Xaa is C or S
PKPXXAPTQLRPVQVRKI

SEQ ID NO: 4012 - protein, 17 aa, Artificial Sequence
  Non-cyclic GFR-binding peptide
  MOD_RES (2)..(2): Xaa is C or S
KXQPSRVHHEPLTVLYY

SEQ ID NO: 4013 - protein, 15 aa, Artificial Sequence
  Non-cyclic GFR-binding peptide
  MOD_RES (1)..(2): Xaa is C or S
XXAPTQLRPVQVRKI

SEQ ID NO: 4014 - protein, 10 aa, Artificial Sequence
  Non-cyclic GFR-binding peptide
EEEPLTMLYY

SEQ ID NO: 4015 - protein, 9 aa, Artificial Sequence
  Non-cyclic GFR-binding peptide
HEPLTVLYY

SEQ ID NO: 4016 - protein, 13 aa, Artificial Sequence
  Non-cyclic GFR-binding peptide
VPTELRSVKMAKV

SEQ ID NO: 4017 - protein, 17 aa, Artificial Sequence
  Non-cyclic GFR-binding peptide
  MOD_RES (3)..(4): Xaa is C or S
KPXXAPTKLSNITVQIM

SEQ ID NO: 4018 - protein, 10 aa, Artificial Sequence
  Non-cyclic GFR-binding peptide
DLSNITIQIM

SEQ ID NO: 4019 - protein, 19 aa, Artificial Sequence
  Non-cyclic GFR-binding peptide
  MOD_RES (4)..(4): Xaa is C or S
SVKXQPSRVHHEPLTVLYY

SEQ ID NO: 4020 - protein, 20 aa, Artificial Sequence
  Non-cyclic GFR-binding peptide
  MOD_RES (6)..(7): Xaa is C or S
SIPKAXXVPTELRSVKMAKV

SEQ ID NO: 4021 - protein, 16 aa, Artificial Sequence
  Non-cyclic GFR-binding peptide
  MOD_RES (2)..(3): Xaa is C or S
PXXAPTQLSNITVQIM

SEQ ID NO: 4022 - protein, 20 aa, Artificial Sequence
  Non-cyclic GFR-binding peptide
  MOD_RES (7)..(7): Xaa is C or S
HVTKPTXAPTKLSNITVQIM

SEQ ID NO: 4023 - protein, 19 aa, Artificial Sequence
  Non-cyclic GFR-binding peptide
  MOD_RES (4)..(4): Xaa is C or S
NVQXRPTQVQLEPLTVLYY

SEQ ID NO: 4024 - protein, 14 aa, Artificial Sequence
  Non-cyclic GFR-binding peptide
  MOD_RES (1)..(1): Xaa is C or S
XAPTKLRPVQVRKI

SEQ ID NO: 4025 - protein, 16 aa, Artificial Sequence
  Non-cyclic GFR-binding peptide
  MOD_RES (14)..(15): Xaa is C or S
FYLMSIANMKTPTXXP

SEQ ID NO: 4026 - protein, 9 aa, Artificial Sequence
  Non-cyclic GFR-binding peptide
FYLMSIANT

SEQ ID NO: 4027 - protein, 15 aa, Artificial Sequence
  Non-cyclic GFR-binding peptide
  MOD_RES (14)..(15): Xaa is C or S
FYLMSIANTKVPAXX

SEQ ID NO: 4028 - protein, 9 aa, Artificial Sequence
  Non-cyclic GFR-binding peptide
FYLMSIANM

SEQ ID NO: 4029 - protein, 15 aa, Artificial Sequence
  Non-cyclic GFR-binding peptide
  MOD_RES (14)..(15): Xaa is C or S
FYLMSIANMKTPTXX

SEQ ID NO: 4030 - protein, 11 aa, Artificial Sequence
  Non-cyclic GFR-binding peptide
FYLMSIANMKT

SEQ ID NO: 4031 - protein, 17 aa, Artificial Sequence
  Non-cyclic GFR-binding peptide
  MOD_RES (14)..(15): Xaa is C or S
FYLMSIANMKTPTXXPG

SEQ ID NO: 4032 - protein, 18 aa, Artificial Sequence
  Non-cyclic GFR-binding peptide
  MOD_RES (14)..(15): Xaa is C or S
FYLMSIANMKTPTXXPGA

SEQ ID NO: 4033 - protein, 19 aa, Artificial Sequence
  Non-cyclic GFR-binding peptide
  MOD_RES (14)..(15): Xaa is C or S
FYLMSIANMKTPTXXPGAS

SEQ ID NO: 4034 - protein, 20 aa, Artificial Sequence
  Non-cyclic GFR-binding peptide
  MOD_RES (14)..(15): Xaa is C or S
FYLMSIANMKTPTXXPGASG

SEQ ID NO: 4035 - protein, 10 aa, Artificial Sequence
  Non-cyclic GFR-binding peptide
FYLMSIANMK

SEQ ID NO: 4036 - protein, 10 aa, Artificial Sequence
  Non-cyclic GFR-binding peptide
FYLMSIANTK

SEQ ID NO: 4037 - protein, 18 aa, Artificial Sequence
  Non-cyclic GFR-binding peptide
  MOD_RES (14)..(15): Xaa is C or S
FYLMSIANTKVPAXXTSP

SEQ ID NO: 4038 - protein, 13 aa, Artificial Sequence
  Non-cyclic GFR-binding peptide
FYLMSIANMKTPT

SEQ ID NO: 4039 - protein, 20 aa, Artificial Sequence
  Non-cyclic GFR-binding peptide
  MOD_RES (14)..(15): Xaa is C or S
FYLMSIANTKVPAXXTSPVR

SEQ ID NO: 4040 - protein, 16 aa, Artificial Sequence
  Non-cyclic GFR-binding peptide
  MOD_RES (14)..(15): Xaa is C or S
FYLMSIANTKVPAXXT

SEQ ID NO: 4041 - protein, 14 aa, Artificial Sequence
  Non-cyclic GFR-binding peptide
  MOD_RES (14)..(14): Xaa is C or S
FYLMSIANTKVPAX

SEQ ID NO: 4042 - protein, 12 aa, Artificial Sequence
  Non-cyclic GFR-binding peptide
FYLMSIANTKVP

SEQ ID NO: 4043 - protein, 14 aa, Artificial Sequence
  Non-cyclic GFR-binding peptide
  MOD_RES (14)..(14): Xaa is C or S
FYLMSIANMKTPTX

SEQ ID NO: 4044 - protein, 13 aa, Artificial Sequence
  Non-cyclic GFR-binding peptide
FYLMSIANTKVPA

SEQ ID NO: 4045 - protein, 19 aa, Artificial Sequence
  Non-cyclic GFR-binding peptide
  MOD_RES (14)..(15): Xaa is C or S
FYLMSIANTKVPAXXTSPV

SEQ ID NO: 4046 - protein, 11 aa, Artificial Sequence
  Non-cyclic GFR-binding peptide
FYLMSIANTKV

SEQ ID NO: 4047 - protein, 12 aa, Artificial Sequence
  Non-cyclic GFR-binding peptide
FYLMSIANMKTP

SEQ ID NO: 4048 - protein, 17 aa, Artificial Sequence
  Non-cyclic GFR-binding peptide
  MOD_RES (14)..(15): Xaa is C or S
FYLMSIANTKVPAXXTS

SEQ ID NO: 4049 - protein, 16 aa, Artificial Sequence
  Non-cyclic GFR-binding peptide
  MOD_RES (2)..(3): Xaa is C or S
PXXTPTKMNAISMLYF

SEQ ID NO: 4050 - protein, 9 aa, Artificial Sequence
  Non-cyclic GFR-binding peptide
TNAISMLYF

SEQ ID NO: 4051 - protein, 15 aa, Artificial Sequence
  Non-cyclic GFR-binding peptide
  MOD_RES (1)..(2): Xaa is C or S
XXAPVKTNAISMLYF

SEQ ID NO: 4052 - protein, 9 aa, Artificial Sequence
  Non-cyclic GFR-binding peptide
MNAISMLYF

SEQ ID NO: 4053 - protein, 15 aa, Artificial Sequence
  Non-cyclic GFR-binding peptide
  MOD_RES (1)..(2): Xaa is C or S
XXTPTKMNAISMLYF

SEQ ID NO: 4054 - protein, 11 aa, Artificial Sequence
  Non-cyclic GFR-binding peptide
TKMNAISMLYF

SEQ ID NO: 4055 - protein, 17 aa, Artificial Sequence
  Non-cyclic GFR-binding peptide
  MOD_RES (3)..(4): Xaa is C or S
GPXXTPTKMNAISMLYF

SEQ ID NO: 4056 - protein, 18 aa, Artificial Sequence
  Non-cyclic GFR-binding peptide
  MOD_RES (4)..(5): Xaa is C or S
AGPXXTPTKMNAISMLYF

SEQ ID NO: 4057 - protein, 19 aa, Artificial Sequence
  Non-cyclic GFR-binding peptide
  MOD_RES (5)..(6): Xaa is C or S
SAGPXXTPTKMNAISMLYF

SEQ ID NO: 4058 - protein, 20 aa, Artificial Sequence
  Non-cyclic GFR-binding peptide
  MOD_RES (6)..(7): Xaa is C or S
GSAGPXXTPTKMNAISMLYF

SEQ ID NO: 4059 - protein, 10 aa, Artificial Sequence
  Non-cyclic GFR-binding peptide
KMNAISMLYF

SEQ ID NO: 4060 - protein, 10 aa, Artificial Sequence
  Non-cyclic GFR-binding peptide
KTNAISMLYF

SEQ ID NO: 4061 - protein, 18 aa, Artificial Sequence
  Non-cyclic GFR-binding peptide
  MOD_RES (4)..(5): Xaa is C or S
PSTXXAPVKTNAISMLYF

SEQ ID NO: 4062 - protein, 13 aa, Artificial Sequence
  Non-cyclic GFR-binding peptide
TPTKMNAISMLYF

SEQ ID NO: 4063 - protein, 20 aa, Artificial Sequence
  Non-cyclic GFR-binding peptide
  MOD_RES (6)..(7): Xaa is C or S
RVPSTXXAPVKTNAISMLYF

SEQ ID NO: 4064 - protein, 16 aa, Artificial Sequence
  Non-cyclic GFR-binding peptide
  MOD_RES (2)..(3): Xaa is C or S
TXXAPVKTNAISMLYF

SEQ ID NO: 4065 - protein, 14 aa, Artificial Sequence
  Non-cyclic GFR-binding peptide
  MOD_RES (1)..(1): Xaa is C or S
XAPVKTNAISMLYF

SEQ ID NO: 4066 - protein, 12 aa, Artificial Sequence
  Non-cyclic GFR-binding peptide
PVKTNAISMLYF

SEQ ID NO: 4067 - protein, 14 aa, Artificial Sequence
  Non-cyclic GFR-binding peptide
  MOD_RES (1)..(1): Xaa is C or S
XTPTKMNAISMLYF

SEQ ID NO: 4068 - protein, 13 aa, Artificial Sequence
  Non-cyclic GFR-binding peptide
APVKTNAISMLYF

SEQ ID NO: 4069 - protein, 19 aa, Artificial Sequence
  Non-cyclic GFR-binding peptide
  MOD_RES (5)..(6): Xaa is C or S
VPSTXXAPVKTNAISMLYF

SEQ ID NO: 4070 - protein, 11 aa, Artificial Sequence
  Non-cyclic GFR-binding peptide
VKTNAISMLYF

SEQ ID NO: 4071 - protein, 12 aa, Artificial Sequence
  Non-cyclic GFR-binding peptide
PTKMNAISMLYF

SEQ ID NO: 4072 - protein, 17 aa, Artificial Sequence
  Non-cyclic GFR-binding peptide
  MOD_RES (3)..(4): Xaa is C or S
STXXAPVKTNAISMLYF

SEQ ID NO: 4073 - protein, 13 aa, Artificial Sequence
  Non-cyclic GFR-binding peptide
YYLISTASLRTPV

SEQ ID NO: 4074 - protein, 14 aa, Artificial Sequence
  Non-cyclic GFR-binding peptide
  MOD_RES (14)..(14): Xaa is C or S
YYLISTASMKEPVX

SEQ ID NO: 4075 - protein, 18 aa, Artificial Sequence
  Non-cyclic GFR-binding peptide
  MOD_RES (14)..(15): Xaa is C or S
FYLINIPSMKEPVXXPEP

SEQ ID NO: 4076 - protein, 20 aa, Artificial Sequence
  Non-cyclic GFR-binding peptide
  MOD_RES (14)..(15): Xaa is C or S
KYLMSIPSMKTPTXXPGASG

SEQ ID NO: 4077 - protein, 11 aa, Artificial Sequence
  Non-cyclic GFR-binding peptide
KYLMSIPSMKT

SEQ ID NO: 4078 - protein, 9 aa, Artificial Sequence
  Non-cyclic GFR-binding peptide
KYLISIPSM

SEQ ID NO: 4079 - protein, 11 aa, Artificial Sequence
  Non-cyclic GFR-binding peptide
LYLISIPELRT

SEQ ID NO: 4080 - protein, 19 aa, Artificial Sequence
  Non-cyclic GFR-binding peptide
  MOD_RES (14)..(15): Xaa is C or S
YYLMSTASTKVPAXXTSPV

SEQ ID NO: 4081 - protein, 16 aa, Artificial Sequence
  Non-cyclic GFR-binding peptide
  MOD_RES (14)..(15): Xaa is C or S
KYLISIPSMKEPVXXP

SEQ ID NO: 4082 - protein, 12 aa, Artificial Sequence
  Non-cyclic GFR-binding peptide
LYLMSIPEMKTP

SEQ ID NO: 4083 - protein, 15 aa, Artificial Sequence
  Non-cyclic GFR-binding peptide
  MOD_RES (14)..(15): Xaa is C or S
YYLISTASLRAPVXX

SEQ ID NO: 4084 - protein, 14 aa, Artificial Sequence
  Non-cyclic GFR-binding peptide
  MOD_RES (14)..(14): Xaa is C or S
YYLISTASLRAPVX

SEQ ID NO: 4085 - protein, 14 aa, Artificial Sequence
  Non-cyclic GFR-binding peptide
  MOD_RES (14)..(14): Xaa is C or S
FYLINIPSLDQPVX

SEQ ID NO: 4086 - protein, 17 aa, Artificial Sequence
  Non-cyclic GFR-binding peptide
  MOD_RES (14)..(15): Xaa is C or S
FYLINIPSLAQPVXXPA

SEQ ID NO: 4087 - protein, 9 aa, Artificial Sequence
  Non-cyclic GFR-binding peptide
FYLISIANM

SEQ ID NO: 4088 - protein, 17 aa, Artificial Sequence
  Non-cyclic GFR-binding peptide
  MOD_RES (14)..(15): Xaa is C or S
YYLMSTASMKTPTXXPG

SEQ ID NO: 4089 - protein, 17 aa, Artificial Sequence
  Non-cyclic GFR-binding peptide
  MOD_RES (14)..(15): Xaa is C or S
FYLINIPSLDQPVXXPS

SEQ ID NO: 4090 - protein, 15 aa, Artificial Sequence
  Non-cyclic GFR-binding peptide
  MOD_RES (14)..(15): Xaa is C or S
LYLMSIPEMKTPTXX

SEQ ID NO: 4091 - protein, 13 aa, Artificial Sequence
  Non-cyclic GFR-binding peptide
LYLMSIPEMKTPT

SEQ ID NO: 4092 - protein, 20 aa, Artificial Sequence
  Non-cyclic GFR-binding peptide
  MOD_RES (14)..(15): Xaa is C or S
KYLVSIPSLKTPAXXPKPVH

SEQ ID NO: 4093 - protein, 15 aa, Artificial Sequence
  Non-cyclic GFR-binding peptide
  MOD_RES (14)..(15): Xaa is C or S
YYLMSTASTKVPAXX

SEQ ID NO: 4094 - protein, 19 aa, Artificial Sequence
  Non-cyclic GFR-binding peptide
  MOD_RES (14)..(15): Xaa is C or S
FYLINIPSLDQPVXXPSAS

SEQ ID NO: 4095 - protein, 20 aa, Artificial Sequence
  Non-cyclic GFR-binding peptide
  MOD_RES (14)..(15): Xaa is C or S
YYLISTASMKEPVXXPEPIG

SEQ ID NO: 4096 - protein, 10 aa, Artificial Sequence
  Non-cyclic GFR-binding peptide
LYLMSIPETK

SEQ ID NO: 4097 - protein, 14 aa, Artificial Sequence
  Non-cyclic GFR-binding peptide
  MOD_RES (14)..(14): Xaa is C or S
FYLINIPSLAQPVX

SEQ ID NO: 4098 - protein, 10 aa, Artificial Sequence
  Non-cyclic GFR-binding peptide
KYLMSIPSTK

SEQ ID NO: 4099 - protein, 17 aa, Artificial Sequence
  Non-cyclic GFR-binding peptide
  MOD_RES (14)..(15): Xaa is C or S
YYLISTASLRTPVXXTP

SEQ ID NO: 4100 - protein, 18 aa, Artificial Sequence
  Non-cyclic GFR-binding peptide
  MOD_RES (14)..(15): Xaa is C or S
LYLMSIPETKVPAXXTSP

SEQ ID NO: 4101 - protein, 20 aa, Artificial Sequence
  Non-cyclic GFR-binding peptide
  MOD_RES (14)..(15): Xaa is C or S
YYLISTASLRAPVXXSAPAA

SEQ ID NO: 4102 - protein, 18 aa, Artificial Sequence
  Non-cyclic GFR-binding peptide
  MOD_RES (14)..(15): Xaa is C or S
FYLINIPSLDQSVXXPSA

SEQ ID NO: 4103 - protein, 18 aa, Artificial Sequence
  Non-cyclic GFR-binding peptide
  MOD_RES (14)..(15): Xaa is C or S
KYLISIPSLRTPVXXTPP

SEQ ID NO: 4104 - protein, 12 aa, Artificial Sequence
  Non-cyclic GFR-binding peptide
LYLMSIPETKVP

SEQ ID NO: 4105 - protein, 16 aa, Artificial Sequence
  Non-cyclic GFR-binding peptide
  MOD_RES (14)..(15): Xaa is C or S
KYLMSIPSMKTPTXXP

SEQ ID NO: 4106 - protein, 12 aa, Artificial Sequence
  Non-cyclic GFR-binding peptide
FYLINIPSLDQP

SEQ ID NO: 4107 - protein, 14 aa, Artificial Sequence
  Non-cyclic GFR-binding peptide
  MOD_RES (14)..(14): Xaa is C or S
YYLISTASLRTPVX

SEQ ID NO: 4108 - protein, 13 aa, Artificial Sequence
  Non-cyclic GFR-binding peptide
YYLMSTASTKVPA

SEQ ID NO: 4109 - protein, 12 aa, Artificial Sequence
  Non-cyclic GFR-binding peptide
YYLISTASLRTP

SEQ ID NO: 4110 - protein, 14 aa, Artificial Sequence
  Non-cyclic GFR-binding peptide
  MOD_RES (14)..(14): Xaa is C or S
LYLMSIPEMKTPTX

SEQ ID NO: 4111 - protein, 18 aa, Artificial Sequence
  Non-cyclic GFR-binding peptide
  MOD_RES (14)..(15): Xaa is C or S
YYLISTASLKTPVXXAKS

SEQ ID NO: 4112 - protein, 16 aa, Artificial Sequence
  Non-cyclic GFR-binding peptide
  MOD_RES (14)..(15): Xaa is C or S
FYLISIANMKEPVXXP

SEQ ID NO: 4113 - protein, 20 aa, Artificial Sequence
  Non-cyclic GFR-binding peptide
  MOD_RES (14)..(15): Xaa is C or S
KYLISIPSLRTPVXXTPPTS

SEQ ID NO: 4114 - protein, 15 aa, Artificial Sequence
  Non-cyclic GFR-binding peptide
  MOD_RES (14)..(15): Xaa is C or S
YYLISTASLRTPVXX

SEQ ID NO: 4115 - protein, 14 aa, Artificial Sequence
  Non-cyclic GFR-binding peptide
  MOD_RES (14)..(14): Xaa is C or S
FYLINIPSLDQSVX

SEQ ID NO: 4116 - protein, 10 aa, Artificial Sequence
  Non-cyclic GFR-binding peptide
YYLMSTASMK

SEQ ID NO: 4117 - protein, 17 aa, Artificial Sequence
  Non-cyclic GFR-binding peptide
  MOD_RES (14)..(15): Xaa is C or S
FYLISIANMKEPVXXPE

SEQ ID NO: 4118 - protein, 14 aa, Artificial Sequence
  Non-cyclic GFR-binding peptide
  MOD_RES (14)..(14): Xaa is C or S
YYLMSTASTKVPAX

SEQ ID NO: 4119 - protein, 16 aa, Artificial Sequence
  Non-cyclic GFR-binding peptide
  MOD_RES (14)..(15): Xaa is C or S
LYLMSIPETKVPAXXT

SEQ ID NO: 4120 - protein, 15 aa, Artificial Sequence
  Non-cyclic GFR-binding peptide
  MOD_RES (14)..(15): Xaa is C or S
FYLINIPSLDQPVXX

SEQ ID NO: 4121 - protein, 19 aa, Artificial Sequence
  Non-cyclic GFR-binding peptide
  MOD_RES (14)..(15): Xaa is C or S
KYLISIPSMKEPVXXPEPI

SEQ ID NO: 4122 - protein, 19 aa, Artificial Sequence
  Non-cyclic GFR-binding peptide
  MOD_RES (14)..(15): Xaa is C or S
YYLISTASLRTPVXXTPPT

SEQ ID NO: 4123 - protein, 20 aa, Artificial Sequence
  Non-cyclic GFR-binding peptide
  MOD_RES (14)..(15): Xaa is C or S
YYLMSTASTKVPAXXTSPVR

SEQ ID NO: 4124 - protein, 11 aa, Artificial Sequence
  Non-cyclic GFR-binding peptide
LYLISIPEMKE

SEQ ID NO: 4125 - protein, 17 aa, Artificial Sequence
  Non-cyclic GFR-binding peptide
  MOD_RES (14)..(15): Xaa is C or S
YYLISTASLRAPVXXSA

SEQ ID NO: 4126 - protein, 18 aa, Artificial Sequence
  Non-cyclic GFR-binding peptide
  MOD_RES (14)..(15): Xaa is C or S
LYLISIPEMKEPVXXPEP

SEQ ID NO: 4127 - protein, 16 aa, Artificial Sequence
  Non-cyclic GFR-binding peptide
  MOD_RES (14)..(15): Xaa is C or S
YYLMSTASMKTPTXXP

SEQ ID NO: 4128 - protein, 16 aa, Artificial Sequence
  Non-cyclic GFR-binding peptide
  MOD_RES (14)..(15): Xaa is C or S
LYLISIPELRTPVXXT

SEQ ID NO: 4129 - protein, 13 aa, Artificial Sequence
  Non-cyclic GFR-binding peptide
FYLINIPSLDQPV

SEQ ID NO: 4130 - protein, 10 aa, Artificial Sequence
  Non-cyclic GFR-binding peptide
FYLINIPSLD

SEQ ID NO: 4131 - protein, 12 aa, Artificial Sequence
  Non-cyclic GFR-binding peptide
KYLMSIPSMKTP

SEQ ID NO: 4132 - protein, 10 aa, Artificial Sequence
  Non-cyclic GFR-binding peptide
FYLISIANMK

SEQ ID NO: 4133 - protein, 19 aa, Artificial Sequence
  Non-cyclic GFR-binding peptide
  MOD_RES (14)..(15): Xaa is C or S
FYLINIPSLDQSVXXPSAS

SEQ ID NO: 4134 - protein, 12 aa, Artificial Sequence
  Non-cyclic GFR-binding peptide
LYLISIPELRTP

SEQ ID NO: 4135 - protein, 14 aa, Artificial Sequence
  Non-cyclic GFR-binding peptide
  MOD_RES (14)..(14): Xaa is C or S
KYLISIPSLRTPVX

SEQ ID NO: 4136 - protein, 15 aa, Artificial Sequence
  Non-cyclic GFR-binding peptide
  MOD_RES (14)..(15): Xaa is C or S
LYLISIPEMKEPVXX

SEQ ID NO: 4137 - protein, 20 aa, Artificial Sequence
  Non-cyclic GFR-binding peptide
  MOD_RES (14)..(15): Xaa is C or S
FYLISIANMKEPVXXPEPIG

SEQ ID NO: 4138 - protein, 17 aa, Artificial Sequence
  Non-cyclic GFR-binding peptide
  MOD_RES (14)..(15): Xaa is C or S
KYLISIPSMKEPVXXPE

SEQ ID NO: 4139 - protein, 9 aa, Artificial Sequence
  Non-cyclic GFR-binding peptide
LYLISIPEM

SEQ ID NO: 4140 - protein, 16 aa, Artificial Sequence
  Non-cyclic GFR-binding peptide
  MOD_RES (14)..(15): Xaa is C or S
YYLISTASLRTPVXXT

SEQ ID NO: 4141 - protein, 10 aa, Artificial Sequence
  Non-cyclic GFR-binding peptide
FYLINIPSLA

SEQ ID NO: 4142 - protein, 13 aa, Artificial Sequence
  Non-cyclic GFR-binding peptide
FYLINIPSLAQPV

SEQ ID NO: 4143 - protein, 11 aa, Artificial Sequence
  Non-cyclic GFR-binding peptide
FYLISIANMKE

SEQ ID NO: 4144 - protein, 12 aa, Artificial Sequence
  Non-cyclic GFR-binding peptide
YYLMSTASTKVP

SEQ ID NO: 4145 - protein, 17 aa, Artificial Sequence
  Non-cyclic GFR-binding peptide
  MOD_RES (14)..(15): Xaa is C or S
LYLISIPELRTPVXXTP

SEQ ID NO: 4146 - protein, 9 aa, Artificial Sequence
  Non-cyclic GFR-binding peptide
LYLMSIPET

SEQ ID NO: 4147 - protein, 13 aa, Artificial Sequence
  Non-cyclic GFR-binding peptide
KYLMSIPSMKTPT

SEQ ID NO: 4148 - protein, 13 aa, Artificial Sequence
  Non-cyclic GFR-binding peptide
YYLMSTASMKTPT

SEQ ID NO: 4149 - protein, 20 aa, Artificial Sequence
  Non-cyclic GFR-binding peptide
  MOD_RES (14)..(15): Xaa is C or S
LYLISIPELRTPVXXTPPTS

SEQ ID NO: 4150 - protein, 10 aa, Artificial Sequence
  Non-cyclic GFR-binding peptide
KYLISIPSMK

SEQ ID NO: 4151 - protein, 13 aa, Artificial Sequence
  Non-cyclic GFR-binding peptide
FYLINIPSLDQSV

SEQ ID NO: 4152 - protein, 12 aa, Artificial Sequence
  Non-cyclic GFR-binding peptide
YYLISTASLRAP

SEQ ID NO: 4153 - protein, 17 aa, Artificial Sequence
  Non-cyclic GFR-binding peptide
  MOD_RES (14)..(15): Xaa is C or S
LYLMSIPEMKTPTXXPG

SEQ ID NO: 4154 - protein, 18 aa, Artificial Sequence
  Non-cyclic GFR-binding peptide
  MOD_RES (14)..(15): Xaa is C or S
YYLMSTASMKTPTXXPGA

SEQ ID NO: 4155 - protein, 19 aa, Artificial Sequence
  Non-cyclic GFR-binding peptide
  MOD_RES (14)..(15): Xaa is C or S
KYLMSIPSTKVPAXXTSPV

SEQ ID NO: 4156 - protein, 16 aa, Artificial Sequence
  Non-cyclic GFR-binding peptide
  MOD_RES (14)..(15): Xaa is C or S
YYLISTASLRAPVXXS

SEQ ID NO: 4157 - protein, 19 aa, Artificial Sequence
  Non-cyclic GFR-binding peptide
  MOD_RES (14)..(15): Xaa is C or S
FYLISIANMKEPVXXPEPI

SEQ ID NO: 4158 - protein, 20 aa, Artificial Sequence
  Non-cyclic GFR-binding peptide
  MOD_RES (14)..(15): Xaa is C or S
LYLVSIPELKTPAXXPKPVH

SEQ ID NO: 4159 - protein, 18 aa, Artificial Sequence
  Non-cyclic GFR-binding peptide
  MOD_RES (14)..(15): Xaa is C or S
KYLISIPSMKEPVXXPEP

SEQ ID NO: 4160 - protein, 14 aa, Artificial Sequence
  Non-cyclic GFR-binding peptide
  MOD_RES (14)..(14): Xaa is C or S
YYLISTASLKTPVX

SEQ ID NO: 4161 - protein, 13 aa, Artificial Sequence
  Non-cyclic GFR-binding peptide
FYLINIPSMKEPV

SEQ ID NO: 4162 - protein, 10 aa, Artificial Sequence
  Non-cyclic GFR-binding peptide
YYLISTASMK

SEQ ID NO: 4163 - protein, 12 aa, Artificial Sequence
  Non-cyclic GFR-binding peptide
KYLMSIPSTKVP

SEQ ID NO: 4164 - protein, 14 aa, Artificial Sequence
  Non-cyclic GFR-binding peptide
  MOD_RES (14)..(14): Xaa is C or S
LYLISIPEMKEPVX

SEQ ID NO: 4165 - protein, 17 aa, Artificial Sequence
  Non-cyclic GFR-binding peptide
  MOD_RES (14)..(15): Xaa is C or S
YYLISTASMKEPVXXPE

SEQ ID NO: 4166 - protein, 14 aa, Artificial Sequence
  Non-cyclic GFR-binding peptide
  MOD_RES (14)..(14): Xaa is C or S
FYLISIANMKEPVX

SEQ ID NO: 4167 - protein, 17 aa, Artificial Sequence
  Non-cyclic GFR-binding peptide
  MOD_RES (14)..(15): Xaa is C or S
YYLISTASLKTPVXXAK

SEQ ID NO: 4168 - protein, 11 aa, Artificial Sequence
  Non-cyclic GFR-binding peptide
KYLISIPSMKE

SEQ ID NO: 4169 - protein, 13 aa, Artificial Sequence
  Non-cyclic GFR-binding peptide
YYLISTASLRAPV

SEQ ID NO: 4170 - protein, 11 aa, Artificial Sequence
  Non-cyclic GFR-binding peptide
YYLISTASLKT

SEQ ID NO: 4171 - protein, 19 aa, Artificial Sequence
  Non-cyclic GFR-binding peptide
  MOD_RES (14)..(15): Xaa is C or S
LYLISIPEMKEPVXXPEPI

SEQ ID NO: 4172 - protein, 11 aa, Artificial Sequence
  Non-cyclic GFR-binding peptide
LYLMSIPETKV

SEQ ID NO: 4173 - protein, 16 aa, Artificial Sequence
  Non-cyclic GFR-binding peptide
  MOD_RES (14)..(15): Xaa is C or S
KYLISIPSLRTPVXXT

SEQ ID NO: 4174 - protein, 15 aa, Artificial Sequence
  Non-cyclic GFR-binding peptide
  MOD_RES (14)..(15): Xaa is C or S
YYLISTASMKEPVXX

SEQ ID NO: 4175 - protein, 11 aa, Artificial Sequence
  Non-cyclic GFR-binding peptide
YYLISTASMKE

SEQ ID NO: 4176 - protein, 19 aa, Artificial Sequence
  Non-cyclic GFR-binding peptide
  MOD_RES (14)..(15): Xaa is C or S
LYLISIPELRTPVXXTPPT

SEQ ID NO: 4177 - protein, 18 aa, Artificial Sequence
  Non-cyclic GFR-binding peptide
  MOD_RES (14)..(15): Xaa is C or S
KYLMSIPSMKTPTXXPGA

SEQ ID NO: 4178 - protein, 14 aa, Artificial Sequence
  Non-cyclic GFR-binding peptide
  MOD_RES (14)..(14): Xaa is C or S
LYLMSIPETKVPAX

SEQ ID NO: 4179 - protein, 18 aa, Artificial Sequence
  Non-cyclic GFR-binding peptide
  MOD_RES (14)..(15): Xaa is C or S
LYLISIPELRTPVXXTPP

SEQ ID NO: 4180 - protein, 15 aa, Artificial Sequence
  Non-cyclic GFR-binding peptide
  MOD_RES (14)..(15): Xaa is C or S
LYLMSIPETKVPAXX

SEQ ID NO: 4181 - protein, 16 aa, Artificial Sequence
  Non-cyclic GFR-binding peptide
  MOD_RES (14)..(15): Xaa is C or S
YYLISTASMKEPVXXP

SEQ ID NO: 4182 - protein, 15 aa, Artificial Sequence
  Non-cyclic GFR-binding peptide
  MOD_RES (14)..(15): Xaa is C or S
YYLISTASLKTPVXX

SEQ ID NO: 4183 - protein, 13 aa, Artificial Sequence
  Non-cyclic GFR-binding peptide
LYLISIPELRTPV

SEQ ID NO: 4184 - protein, 16 aa, Artificial Sequence
  Non-cyclic GFR-binding peptide
  MOD_RES (14)..(15): Xaa is C or S
LYLMSIPEMKTPTXXP

SEQ ID NO: 4185 - protein, 20 aa, Artificial Sequence
  Non-cyclic GFR-binding peptide
  MOD_RES (14)..(15): Xaa is C or S
YYLISTASLKTPVXXAKSAK

SEQ ID NO: 4186 - protein, 10 aa, Artificial Sequence
  Non-cyclic GFR-binding peptide
LYLMSIPEMK

SEQ ID NO: 4187 - protein, 12 aa, Artificial Sequence
  Non-cyclic GFR-binding peptide
FYLINIPSMKEP

SEQ ID NO: 4188 - protein, 18 aa, Artificial Sequence
  Non-cyclic GFR-binding peptide
  MOD_RES (14)..(15): Xaa is C or S
YYLISTASMKEPVXXPEP

SEQ ID NO: 4189 - protein, 17 aa, Artificial Sequence
  Non-cyclic GFR-binding peptide
  MOD_RES (14)..(15): Xaa is C or S
LYLMSIPETKVPAXXTS

SEQ ID NO: 4190 - protein, 19 aa, Artificial Sequence
  Non-cyclic GFR-binding peptide
  MOD_RES (14)..(15): Xaa is C or S
YYLISTASMKEPVXXPEPI

SEQ ID NO: 4191 - protein, 18 aa, Artificial Sequence
  Non-cyclic GFR-binding peptide
  MOD_RES (14)..(15): Xaa is C or S
YYLISTASLRTPVXXTPP

SEQ ID NO: 4192 - protein, 17 aa, Artificial Sequence
  Non-cyclic GFR-binding peptide
  MOD_RES (14)..(15): Xaa is C or S
LYLISIPEMKEPVXXPE

SEQ ID NO: 4193 - protein, 15 aa, Artificial Sequence
  Non-cyclic GFR-binding peptide
  MOD_RES (14)..(15): Xaa is C or S
KYLMSIPSTKVPAXX

SEQ ID NO: 4194 - protein, 10 aa, Artificial Sequence
  Non-cyclic GFR-binding peptide
YYLMSTASTK

SEQ ID NO: 4195 - protein, 10 aa, Artificial Sequence
  Non-cyclic GFR-binding peptide
KYLMSIPSMK

SEQ ID NO: 4196 - protein, 14 aa, Artificial Sequence
  Non-cyclic GFR-binding peptide
  MOD_RES (14)..(14): Xaa is C or S
LYLISIPELRTPVX

SEQ ID NO: 4197 - protein, 11 aa, Artificial Sequence
  Non-cyclic GFR-binding peptide
YYLMSTASTKV

SEQ ID NO: 4198 - protein, 10 aa, Artificial Sequence
  Non-cyclic GFR-binding peptide
LYLISIPEMK

SEQ ID NO: 4199 - protein, 15 aa, Artificial Sequence
  Non-cyclic GFR-binding peptide
  MOD_RES (14)..(15): Xaa is C or S
FYLISIANMKEPVXX

SEQ ID NO: 4200 - protein, 9 aa, Artificial Sequence
  Non-cyclic GFR-binding peptide
YYLISTASM

SEQ ID NO: 4201 - protein, 17 aa, Artificial Sequence
  Non-cyclic GFR-binding peptide
  MOD_RES (14)..(15): Xaa is C or S
KYLMSIPSMKTPTXXPG

SEQ ID NO: 4202 - protein, 14 aa, Artificial Sequence
  Non-cyclic GFR-binding peptide
  MOD_RES (14)..(14): Xaa is C or S
KYLMSIPSTKVPAX

SEQ ID NO: 4203 - protein, 20 aa, Artificial Sequence
  Non-cyclic GFR-binding peptide
  MOD_RES (14)..(15): Xaa is C or S
LYLISIPEMKEPVXXPEPIG

SEQ ID NO: 4204 - protein, 11 aa, Artificial Sequence
  Non-cyclic GFR-binding peptide
FYLINIPSLAQ

SEQ ID NO: 4205 - protein, 19 aa, Artificial Sequence
  Non-cyclic GFR-binding peptide
  MOD_RES (14)..(15): Xaa is C or S
KYLISIPSLRTPVXXTPPT

SEQ ID NO: 4206 - protein, 20 aa, Artificial Sequence
  Non-cyclic GFR-binding peptide
  MOD_RES (14)..(15): Xaa is C or S
FYLINIPSLDQSVXXPSASA

SEQ ID NO: 4207 - protein, 16 aa, Artificial Sequence
  Non-cyclic GFR-binding peptide
  MOD_RES (14)..(15): Xaa is C or S
FYLINIPSLDQPVXXP

SEQ ID NO: 4208 - protein, 19 aa, Artificial Sequence
  Non-cyclic GFR-binding peptide
  MOD_RES (14)..(15): Xaa is C or S
YYLISTASLRAPVXXSAPA

SEQ ID NO: 4209 - protein, 18 aa, Artificial Sequence
  Non-cyclic GFR-binding peptide
  MOD_RES (14)..(15): Xaa is C or S
LYLMSIPEMKTPTXXPGA

SEQ ID NO: 4210 - protein, 13 aa, Artificial Sequence
  Non-cyclic GFR-binding peptide
KYLISIPSMKEPV

SEQ ID NO: 4211 - protein, 15 aa, Artificial Sequence
  Non-cyclic GFR-binding peptide
  MOD_RES (14)..(15): Xaa is C or S
KYLISIPSMKEPVXX

SEQ ID NO: 4212 - protein, 12 aa, Artificial Sequence
  Non-cyclic GFR-binding peptide
KYLISIPSLRTP

SEQ ID NO: 4213 - protein, 13 aa, Artificial Sequence
  Non-cyclic GFR-binding peptide
FYLISIANMKEPV

SEQ ID NO: 4214 - protein, 10 aa, Artificial Sequence
  Non-cyclic GFR-binding peptide
YYLISTASLK

SEQ ID NO: 4215 - protein, 20 aa, Artificial Sequence
  Non-cyclic GFR-binding peptide
  MOD_RES (14)..(15): Xaa is C or S
YYLISTASLRTPVXXTPPTS

SEQ ID NO: 4216 - protein, 20 aa, Artificial Sequence
  Non-cyclic GFR-binding peptide
  MOD_RES (14)..(15): Xaa is C or S
FYLINIPSMKEPVXXPEPIG

SEQ ID NO: 4217 - protein, 19 aa, Artificial Sequence
  Non-cyclic GFR-binding peptide
  MOD_RES (14)..(15): Xaa is C or S
LYLMSIPETKVPAXXTSPV

SEQ ID NO: 4218 - protein, 20 aa, Artificial Sequence
  Non-cyclic GFR-binding peptide
  MOD_RES (14)..(15): Xaa is C or S
KYLMSIPSTKVPAXXTSPVR

SEQ ID NO: 4219 - protein, 12 aa, Artificial Sequence
  Non-cyclic GFR-binding peptide
YYLMSTASMKTP

SEQ ID NO: 4220 - protein, 12 aa, Artificial Sequence
  Non-cyclic GFR-binding peptide
KYLISIPSMKEP

SEQ ID NO: 4221 - protein, 14 aa, Artificial Sequence
  Non-cyclic GFR-binding peptide
  MOD_RES (14)..(14): Xaa is C or S
KYLISIPSMKEPVX

SEQ ID NO: 4222 - protein, 17 aa, Artificial Sequence
  Non-cyclic GFR-binding peptide
  MOD_RES (14)..(15): Xaa is C or S
FYLINIPSMKEPVXXPE

SEQ ID NO: 4223 - protein, 18 aa, Artificial Sequence
  Non-cyclic GFR-binding peptide
  MOD_RES (14)..(15): Xaa is C or S
FYLISIANMKEPVXXPEP

SEQ ID NO: 4224 - protein, 15 aa, Artificial Sequence
  Non-cyclic GFR-binding peptide
  MOD_RES (14)..(15): Xaa is C or S
KYLISIPSLRTPVXX

SEQ ID NO: 4225 - protein, 12 aa, Artificial Sequence
  Non-cyclic GFR-binding peptide
FYLINIPSLAQP

SEQ ID NO: 4226 - protein, 9 aa, Artificial Sequence
  Non-cyclic GFR-binding peptide
LYLMSIPEM

SEQ ID NO: 4227 - protein, 20 aa, Artificial Sequence
  Non-cyclic GFR-binding peptide
  MOD_RES (14)..(15): Xaa is C or S
YYLMSTASMKTPTXXPGASG

SEQ ID NO: 4228 - protein, 16 aa, Artificial Sequence
  Non-cyclic GFR-binding peptide
  MOD_RES (14)..(15): Xaa is C or S
FYLINIPSMKEPVXXP

SEQ ID NO: 4229 - protein, 11 aa, Artificial Sequence
  Non-cyclic GFR-binding peptide
FYLINIPSLDQ

SEQ ID NO: 4230 - protein, 13 aa, Artificial Sequence
  Non-cyclic GFR-binding peptide
KYLISIPSLRTPV

SEQ ID NO: 4231 - protein, 19 aa, Artificial Sequence
  Non-cyclic GFR-binding peptide
  MOD_RES (14)..(15): Xaa is C or S
YYLISTASLKTPVXXAKSA

SEQ ID NO: 4232 - protein, 12 aa, Artificial Sequence
  Non-cyclic GFR-binding peptide
FYLINIPSLDQS

SEQ ID NO: 4233 - protein, 13 aa, Artificial Sequence
  Non-cyclic GFR-binding peptide
KYLMSIPSTKVPA

SEQ ID NO: 4234 - protein, 20 aa, Artificial Sequence
  Non-cyclic GFR-binding peptide
  MOD_RES (14)..(15): Xaa is C or S
FYLINIPSLAQPVXXPAASA

SEQ ID NO: 4235 - protein, 11 aa, Artificial Sequence
  Non-cyclic GFR-binding peptide
KYLISIPSLRT

SEQ ID NO: 4236 - protein, 17 aa, Artificial Sequence
  Non-cyclic GFR-binding peptide
  MOD_RES (14)..(15): Xaa is C or S
KYLISIPSLRTPVXXTP

SEQ ID NO: 4237 - protein, 19 aa, Artificial Sequence
  Non-cyclic GFR-binding peptide
  MOD_RES (14)..(15): Xaa is C or S
KYLMSIPSMKTPTXXPGAS

SEQ ID NO: 4238 - protein, 9 aa, Artificial Sequence
  Non-cyclic GFR-binding peptide
YYLMSTASM

SEQ ID NO: 4239 - protein, 16 aa, Artificial Sequence
  Non-cyclic GFR-binding peptide
  MOD_RES (14)..(15): Xaa is C or S
LYLISIPEMKEPVXXP

SEQ ID NO: 4240 - protein, 19 aa, Artificial Sequence
  Non-cyclic GFR-binding peptide
  MOD_RES (14)..(15): Xaa is C or S
FYLINIPSMKEPVXXPEPI

SEQ ID NO: 4241 - protein, 15 aa, Artificial Sequence
  Non-cyclic GFR-binding peptide
  MOD_RES (14)..(15): Xaa is C or S
YYLMSTASMKTPTXX

SEQ ID NO: 4242 - protein, 20 aa, Artificial Sequence
  Non-cyclic GFR-binding peptide
  MOD_RES (14)..(15): Xaa is C or S
LYLMSIPEMKTPTXXPGASG

SEQ ID NO: 4243 - protein, 11 aa, Artificial Sequence
  Non-cyclic GFR-binding peptide
LYLMSIPEMKT

SEQ ID NO: 4244 - protein, 15 aa, Artificial Sequence
  Non-cyclic GFR-binding peptide
  MOD_RES (14)..(15): Xaa is C or S
FYLINIPSLAQPVXX

SEQ ID NO: 4245 - protein, 18 aa, Artificial Sequence
  Non-cyclic GFR-binding peptide
  MOD_RES (14)..(15): Xaa is C or S
FYLINIPSLDQPVXXPSA

SEQ ID NO: 4246 - protein, 18 aa, Artificial Sequence
  Non-cyclic GFR-binding peptide
  MOD_RES (14)..(15): Xaa is C or S
YYLMSTASTKVPAXXTSP

SEQ ID NO: 4247 - protein, 13 aa, Artificial Sequence
  Non-cyclic GFR-binding peptide
LYLISIPEMKEPV

SEQ ID NO: 4248 - protein, 18 aa, Artificial Sequence
  Non-cyclic GFR-binding peptide
  MOD_RES (14)..(15): Xaa is C or S
YYLISTASLRAPVXXSAP

SEQ ID NO: 4249 - protein, 20 aa, Artificial Sequence
  Non-cyclic GFR-binding peptide
  MOD_RES (14)..(15): Xaa is C or S
YYLVSTASLKTPAXXPKPVH

SEQ ID NO: 4250 - protein, 9 aa, Artificial Sequence
  Non-cyclic GFR-binding peptide
FYLINIPSM

SEQ ID NO: 4251 - protein, 18 aa, Artificial Sequence
  Non-cyclic GFR-binding peptide
  MOD_RES (14)..(15): Xaa is C or S
FYLINIPSLAQPVXXPAA

SEQ ID NO: 4252 - protein, 15 aa, Artificial Sequence
  Non-cyclic GFR-binding peptide
  MOD_RES (14)..(15): Xaa is C or S
FYLINIPSMKEPVXX

SEQ ID NO: 4253 - protein, 16 aa, Artificial Sequence
  Non-cyclic GFR-binding peptide
  MOD_RES (14)..(15): Xaa is C or S
YYLISTASLKTPVXXA

SEQ ID NO: 4254 - protein, 19 aa, Artificial Sequence
  Non-cyclic GFR-binding peptide
  MOD_RES (14)..(15): Xaa is C or S
YYLMSTASMKTPTXXPGAS

SEQ ID NO: 4255 - protein, 12 aa, Artificial Sequence
  Non-cyclic GFR-binding peptide
YYLISTASMKEP

SEQ ID NO: 4256 - protein, 11 aa, Artificial Sequence
  Non-cyclic GFR-binding peptide
FYLINIPSMKE

SEQ ID NO: 4257 - protein, 11 aa, Artificial Sequence
  Non-cyclic GFR-binding peptide
YYLISTASLRT

SEQ ID NO: 4258 - protein, 20 aa, Artificial Sequence
  Non-cyclic GFR-binding peptide
  MOD_RES (14)..(15): Xaa is C or S
KYLISIPSMKEPVXXPEPIG

SEQ ID NO: 4259 - protein, 10 aa, Artificial Sequence
  Non-cyclic GFR-binding peptide
YYLISTASLR

SEQ ID NO: 4260 - protein, 15 aa, Artificial Sequence
  Non-cyclic GFR-binding peptide
  MOD_RES (14)..(15): Xaa is C or S
FYLINIPSLDQSVXX

SEQ ID NO: 4261 - protein, 9 aa, Artificial Sequence
  Non-cyclic GFR-binding peptide
KYLMSIPSM

SEQ ID NO: 4262 - protein, 9 aa, Artificial Sequence
  Non-cyclic GFR-binding peptide
YYLMSTAST

SEQ ID NO: 4263 - protein, 16 aa, Artificial Sequence
  Non-cyclic GFR-binding peptide
  MOD_RES (14)..(15): Xaa is C or S
FYLINIPSLAQPVXXP

SEQ ID NO: 4264 - protein, 11 aa, Artificial Sequence
  Non-cyclic GFR-binding peptide
KYLMSIPSTKV

SEQ ID NO: 4265 - protein, 12 aa, Artificial Sequence
  Non-cyclic GFR-binding peptide
LYLISIPEMKEP

SEQ ID NO: 4266 - protein, 18 aa, Artificial Sequence
  Non-cyclic GFR-binding peptide
  MOD_RES (14)..(15): Xaa is C or S
KYLMSIPSTKVPAXXTSP

SEQ ID NO: 4267 - protein, 10 aa, Artificial Sequence
  Non-cyclic GFR-binding peptide
FYLINIPSMK

SEQ ID NO: 4268 - protein, 11 aa, Artificial Sequence
  Non-cyclic GFR-binding peptide
YYLMSTASMKT

SEQ ID NO: 4269 - protein, 20 aa, Artificial Sequence
  Non-cyclic GFR-binding peptide
  MOD_RES (14)..(15): Xaa is C or S
LYLMSIPETKVPAXXTSPVR

SEQ ID NO: 4270 - protein, 14 aa, Artificial Sequence
  Non-cyclic GFR-binding peptide
  MOD_RES (14)..(14): Xaa is C or S
YYLMSTASMKTPTX

SEQ ID NO: 4271 - protein, 12 aa, Artificial Sequence
  Non-cyclic GFR-binding peptide
YYLISTASLKTP

SEQ ID NO: 4272 - protein, 16 aa, Artificial Sequence
  Non-cyclic GFR-binding peptide
  MOD_RES (14)..(15): Xaa is C or S
YYLMSTASTKVPAXXT

SEQ ID NO: 4273 - protein, 15 aa, Artificial Sequence
  Non-cyclic GFR-binding peptide
  MOD_RES (14)..(15): Xaa is C or S
KYLMSIPSMKTPTXX

SEQ ID NO: 4274 - protein, 16 aa, Artificial Sequence
  Non-cyclic GFR-binding peptide
  MOD_RES (14)..(15): Xaa is C or S
FYLINIPSLDQSVXXP

SEQ ID NO: 4275 - protein, 17 aa, Artificial Sequence
  Non-cyclic GFR-binding peptide
  MOD_RES (14)..(15): Xaa is C or S
YYLMSTASTKVPAXXTS

SEQ ID NO: 4276 - protein, 13 aa, Artificial Sequence
  Non-cyclic GFR-binding peptide
YYLISTASMKEPV

SEQ ID NO: 4277 - protein, 19 aa, Artificial Sequence
  Non-cyclic GFR-binding peptide
  MOD_RES (14)..(15): Xaa is C or S
LYLMSIPEMKTPTXXPGAS

SEQ ID NO: 4278 - protein, 12 aa, Artificial Sequence
  Non-cyclic GFR-binding peptide
FYLISIANMKEP

SEQ ID NO: 4279 - protein, 13 aa, Artificial Sequence
  Non-cyclic GFR-binding peptide
LYLMSIPETKVPA

SEQ ID NO: 4280 - protein, 16 aa, Artificial Sequence
  Non-cyclic GFR-binding peptide
  MOD_RES (14)..(15): Xaa is C or S
KYLMSIPSTKVPAXXT

SEQ ID NO: 4281 - protein, 17 aa, Artificial Sequence
  Non-cyclic GFR-binding peptide
  MOD_RES (14)..(15): Xaa is C or S
FYLINIPSLDQSVXXPS

SEQ ID NO: 4282 - protein, 9 aa, Artificial Sequence
  Non-cyclic GFR-binding peptide
KYLMSIPST

SEQ ID NO: 4283 - protein, 20 aa, Artificial Sequence
  Non-cyclic GFR-binding peptide
  MOD_RES (14)..(15): Xaa is C or S
FYLINIPSLDQPVXXPSASA

SEQ ID NO: 4284 - protein, 11 aa, Artificial Sequence
  Non-cyclic GFR-binding peptide
YYLISTASLRA

SEQ ID NO: 4285 - protein, 13 aa, Artificial Sequence
  Non-cyclic GFR-binding peptide
YYLISTASLKTPV

SEQ ID NO: 4286 - protein, 19 aa, Artificial Sequence
  Non-cyclic GFR-binding peptide
  MOD_RES (14)..(15): Xaa is C or S
FYLINIPSLAQPVXXPAAS

SEQ ID NO: 4287 - protein, 17 aa, Artificial Sequence
  Non-cyclic GFR-binding peptide
  MOD_RES (14)..(15): Xaa is C or S
KYLMSIPSTKVPAXXTS

SEQ ID NO: 4288 - protein, 15 aa, Artificial Sequence
  Non-cyclic GFR-binding peptide
  MOD_RES (14)..(15): Xaa is C or S
LYLISIPELRTPVXX

SEQ ID NO: 4289 - protein, 14 aa, Artificial Sequence
  Non-cyclic GFR-binding peptide
  MOD_RES (14)..(14): Xaa is C or S
KYLMSIPSMKTPTX

SEQ ID NO: 4290 - protein, 14 aa, Artificial Sequence
  Non-cyclic GFR-binding peptide
  MOD_RES (14)..(14): Xaa is C or S
FYLINIPSMKEPVX

SEQ ID NO: 4291 - protein, 13 aa, Artificial Sequence
  Non-cyclic GFR-binding peptide
VPTRLSATSILYY

SEQ ID NO: 4292 - protein, 14 aa, Artificial Sequence
  Non-cyclic GFR-binding peptide
  MOD_RES (1)..(1): Xaa is C or S
XVPEKMSATSILYY

SEQ ID NO: 4293 - protein, 18 aa, Artificial Sequence
  Non-cyclic GFR-binding peptide
  MOD_RES (4)..(5): Xaa is C or S
PEPXXVPEKMSPINILYF

SEQ ID NO: 4294 - protein, 20 aa, Artificial Sequence
  Non-cyclic GFR-binding peptide
  MOD_RES (6)..(7): Xaa is C or S
GSAGPXXTPTKMSPISMLYK

SEQ ID NO: 4295 - protein, 11 aa, Artificial Sequence
  Non-cyclic GFR-binding peptide
TKMSPISMLYK

SEQ ID NO: 4296 - protein, 9 aa, Artificial Sequence
  Non-cyclic GFR-binding peptide
MSPISILYK

SEQ ID NO: 4297 - protein, 11 aa, Artificial Sequence
  Non-cyclic GFR-binding peptide
TRLEPISILYL

SEQ ID NO: 4298 - protein, 19 aa, Artificial Sequence
  Non-cyclic GFR-binding peptide
  MOD_RES (5)..(6): Xaa is C or S
VPSTXXAPVKTSATSMLYY

SEQ ID NO: 4299 - protein, 16 aa, Artificial Sequence
  Non-cyclic GFR-binding peptide
  MOD_RES (2)..(3): Xaa is C or S
PXXVPEKMSPISILYK

SEQ ID NO: 4300 - protein, 12 aa, Artificial Sequence
  Non-cyclic GFR-binding peptide
PTKMEPISMLYL

SEQ ID NO: 4301 - protein, 15 aa, Artificial Sequence
  Non-cyclic GFR-binding peptide
  MOD_RES (1)..(2): Xaa is C or S
XXVPARLSATSILYY

SEQ ID NO: 4302 - protein, 14 aa, Artificial Sequence
  Non-cyclic GFR-binding peptide
  MOD_RES (1)..(1): Xaa is C or S
XVPARLSATSILYY

SEQ ID NO: 4303 - protein, 14 aa, Artificial Sequence
  Non-cyclic GFR-binding peptide
  MOD_RES (1)..(1): Xaa is C or S
XVPQDLSPINILYF

SEQ ID NO: 4304 - protein, 17 aa, Artificial Sequence
  Non-cyclic GFR-binding peptide
  MOD_RES (3)..(4): Xaa is C or S
APXXVPQALSPINILYF

SEQ ID NO: 4305 - protein, 9 aa, Artificial Sequence
  Non-cyclic GFR-binding peptide
MNAISILYF

SEQ ID NO: 4306 - protein, 17 aa, Artificial Sequence
  Non-cyclic GFR-binding peptide
  MOD_RES (3)..(4): Xaa is C or S
GPXXTPTKMSATSMLYY

SEQ ID NO: 4307 - protein, 17 aa, Artificial Sequence
  Non-cyclic GFR-binding peptide
  MOD_RES (3)..(4): Xaa is C or S
SPXXVPQDLSPINILYF

SEQ ID NO: 4308 - protein, 15 aa, Artificial Sequence
  Non-cyclic GFR-binding peptide
  MOD_RES (1)..(2): Xaa is C or S
XXTPTKMEPISMLYL

SEQ ID NO: 4309 - protein, 13 aa, Artificial Sequence
  Non-cyclic GFR-binding peptide
TPTKMEPISMLYL

SEQ ID NO: 4310 - protein, 20 aa, Artificial Sequence
  Non-cyclic GFR-binding peptide
  MOD_RES (6)..(7): Xaa is C or S
HVPKPXXAPTKLSPISVLYK

SEQ ID NO: 4311 - protein, 15 aa, Artificial Sequence
  Non-cyclic GFR-binding peptide
  MOD_RES (1)..(2): Xaa is C or S
XXAPVKTSATSMLYY

SEQ ID NO: 4312 - protein, 19 aa, Artificial Sequence
  Non-cyclic GFR-binding peptide
  MOD_RES (5)..(6): Xaa is C or S
SASPXXVPQDLSPINILYF

SEQ ID NO: 4313 - protein, 20 aa, Artificial Sequence
  Non-cyclic GFR-binding peptide
  MOD_RES (6)..(7): Xaa is C or S
GIPEPXXVPEKMSATSILYY

SEQ ID NO: 4314 - protein, 10 aa, Artificial Sequence
  Non-cyclic GFR-binding peptide
KTEPISMLYL

SEQ ID NO: 4315 - protein, 14 aa, Artificial Sequence
  Non-cyclic GFR-binding peptide
  MOD_RES (1)..(1): Xaa is C or S
XVPQALSPINILYF

SEQ ID NO: 4316 - protein, 10 aa, Artificial Sequence
  Non-cyclic GFR-binding peptide
KTSPISMLYK

SEQ ID NO: 4317 - protein, 17 aa, Artificial Sequence
  Non-cyclic GFR-binding peptide
  MOD_RES (3)..(4): Xaa is C or S
PTXXVPTRLSATSILYY

SEQ ID NO: 4318 - protein, 18 aa, Artificial Sequence
  Non-cyclic GFR-binding peptide
  MOD_RES (4)..(5): Xaa is C or S
PSTXXAPVKTEPISMLYL

SEQ ID NO: 4319 - protein, 20 aa, Artificial Sequence
  Non-cyclic GFR-binding peptide
  MOD_RES (6)..(7): Xaa is C or S
AAPASXXVPARLSATSILYY

SEQ ID NO: 4320 - protein, 18 aa, Artificial Sequence
  Non-cyclic GFR-binding peptide
  MOD_RES (4)..(5): Xaa is C or S
ASPXXVSQDLSPINILYF

SEQ ID NO: 4321 - protein, 18 aa, Artificial Sequence
  Non-cyclic GFR-binding peptide
  MOD_RES (4)..(5): Xaa is C or S
PPTXXVPTRLSPISILYK

SEQ ID NO: 4322 - protein, 12 aa, Artificial Sequence
  Non-cyclic GFR-binding peptide
PVKTEPISMLYL

SEQ ID NO: 4323 - protein, 16 aa, Artificial Sequence
  Non-cyclic GFR-binding peptide
  MOD_RES (2)..(3): Xaa is C or S
PXXTPTKMSPISMLYK

SEQ ID NO: 4324 - protein, 12 aa, Artificial Sequence
  Non-cyclic GFR-binding peptide
PQDLSPINILYF

SEQ ID NO: 4325 - protein, 14 aa, Artificial Sequence
  Non-cyclic GFR-binding peptide
  MOD_RES (1)..(1): Xaa is C or S
XVPTRLSATSILYY

SEQ ID NO: 4326 - protein, 13 aa, Artificial Sequence
  Non-cyclic GFR-binding peptide
APVKTSATSMLYY

SEQ ID NO: 4327 - protein, 12 aa, Artificial Sequence
  Non-cyclic GFR-binding peptide
PTRLSATSILYY

SEQ ID NO: 4328 - protein, 14 aa, Artificial Sequence
  Non-cyclic GFR-binding peptide
  MOD_RES (1)..(1): Xaa is C or S
XTPTKMEPISMLYL

SEQ ID NO: 4329 - protein, 18 aa, Artificial Sequence
  Non-cyclic GFR-binding peptide
  MOD_RES (4)..(5): Xaa is C or S
SKAXXVPTKLSATSILYY

SEQ ID NO: 4330 - protein, 16 aa, Artificial Sequence
  Non-cyclic GFR-binding peptide
  MOD_RES (2)..(3): Xaa is C or S
PXXVPEKMNAISILYF

SEQ ID NO: 4331 - protein, 20 aa, Artificial Sequence
  Non-cyclic GFR-binding peptide
  MOD_RES (6)..(7): Xaa is C or S
STPPTXXVPTRLSPISILYK

SEQ ID NO: 4332 - protein, 15 aa, Artificial Sequence
  Non-cyclic GFR-binding peptide
  MOD_RES (1)..(2): Xaa is C or S
XXVPTRLSATSILYY

SEQ ID NO: 4333 - protein, 14 aa, Artificial Sequence
  Non-cyclic GFR-binding peptide
  MOD_RES (1)..(1): Xaa is C or S
XVSQDLSPINILYF

SEQ ID NO: 4334 - protein, 10 aa, Artificial Sequence
  Non-cyclic GFR-binding peptide
KMSATSMLYY

SEQ ID NO: 4335 - protein, 17 aa, Artificial Sequence
  Non-cyclic GFR-binding peptide
  MOD_RES (3)..(4): Xaa is C or S
EPXXVPEKMNAISILYF

SEQ ID NO: 4336 - protein, 14 aa, Artificial Sequence
  Non-cyclic GFR-binding peptide
  MOD_RES (1)..(1): Xaa is C or S
XAPVKTSATSMLYY

SEQ ID NO: 4337 - protein, 16 aa, Artificial Sequence
  Non-cyclic GFR-binding peptide
  MOD_RES (2)..(3): Xaa is C or S
TXXAPVKTEPISMLYL

SEQ ID NO: 4338 - protein, 15 aa, Artificial Sequence
  Non-cyclic GFR-binding peptide
  MOD_RES (1)..(2): Xaa is C or S
XXVPQDLSPINILYF

SEQ ID NO: 4339 - protein, 19 aa, Artificial Sequence
  Non-cyclic GFR-binding peptide
  MOD_RES (5)..(6): Xaa is C or S
IPEPXXVPEKMSPISILYK

SEQ ID NO: 4340 - protein, 19 aa, Artificial Sequence
  Non-cyclic GFR-binding peptide
  MOD_RES (5)..(6): Xaa is C or S
TPPTXXVPTRLSATSILYY

SEQ ID NO: 4341 - protein, 20 aa, Artificial Sequence
  Non-cyclic GFR-binding peptide
  MOD_RES (6)..(7): Xaa is C or S
RVPSTXXAPVKTSATSMLYY

SEQ ID NO: 4342 - protein, 11 aa, Artificial Sequence
  Non-cyclic GFR-binding peptide
EKMEPISILYL

SEQ ID NO: 4343 - protein, 17 aa, Artificial Sequence
  Non-cyclic GFR-binding peptide
  MOD_RES (3)..(4): Xaa is C or S
ASXXVPARLSATSILYY

SEQ ID NO: 4344 - protein, 18 aa, Artificial Sequence
  Non-cyclic GFR-binding peptide
  MOD_RES (4)..(5): Xaa is C or S
PEPXXVPEKMEPISILYL

SEQ ID NO: 4345 - protein, 16 aa, Artificial Sequence
  Non-cyclic GFR-binding peptide
  MOD_RES (2)..(3): Xaa is C or S
PXXTPTKMSATSMLYY

SEQ ID NO: 4346 - protein, 16 aa, Artificial Sequence
  Non-cyclic GFR-binding peptide
  MOD_RES (2)..(3): Xaa is C or S
TXXVPTRLEPISILYL

SEQ ID NO: 4347 - protein, 13 aa, Artificial Sequence
  Non-cyclic GFR-binding peptide
VPQDLSPINILYF

SEQ ID NO: 4348 - protein, 10 aa, Artificial Sequence
  Non-cyclic GFR-binding peptide
DLSPINILYF

SEQ ID NO: 4349 - protein, 12 aa, Artificial Sequence
  Non-cyclic GFR-binding peptide
PTKMSPISMLYK

SEQ ID NO: 4350 - protein, 10 aa, Artificial Sequence
  Non-cyclic GFR-binding peptide
KMNAISILYF

SEQ ID NO: 4351 - protein, 19 aa, Artificial Sequence
  Non-cyclic GFR-binding peptide
  MOD_RES (5)..(6): Xaa is C or S
SASPXXVSQDLSPINILYF

SEQ ID NO: 4352 - protein, 12 aa, Artificial Sequence
  Non-cyclic GFR-binding peptide
PTRLEPISILYL

SEQ ID NO: 4353 - protein, 14 aa, Artificial Sequence
  Non-cyclic GFR-binding peptide
  MOD_RES (1)..(1): Xaa is C or S
XVPTRLSPISILYK

SEQ ID NO: 4354 - protein, 15 aa, Artificial Sequence
  Non-cyclic GFR-binding peptide
  MOD_RES (1)..(2): Xaa is C or S
XXVPEKMEPISILYL

SEQ ID NO: 4355 - protein, 20 aa, Artificial Sequence
  Non-cyclic GFR-binding peptide
  MOD_RES (6)..(7): Xaa is C or S
GIPEPXXVPEKMNAISILYF

SEQ ID NO: 4356 - protein, 17 aa, Artificial Sequence
  Non-cyclic GFR-binding peptide
  MOD_RES (3)..(4): Xaa is C or S
EPXXVPEKMSPISILYK

SEQ ID NO: 4357 - protein, 9 aa, Artificial Sequence
  Non-cyclic GFR-binding peptide
MEPISILYL

SEQ ID NO: 4358 - protein, 16 aa, Artificial Sequence
  Non-cyclic GFR-binding peptide
  MOD_RES (2)..(3): Xaa is C or S
TXXVPTRLSATSILYY

SEQ ID NO: 4359 - protein, 10 aa, Artificial Sequence
  Non-cyclic GFR-binding peptide
ALSPINILYF

SEQ ID NO: 4360 - protein, 13 aa, Artificial Sequence
  Non-cyclic GFR-binding peptide
VPQALSPINILYF

SEQ ID NO: 4361 - protein, 11 aa, Artificial Sequence
  Non-cyclic GFR-binding peptide
EKMNAISILYF

SEQ ID NO: 4362 - protein, 12 aa, Artificial Sequence
  Non-cyclic GFR-binding peptide
PVKTSATSMLYY

SEQ ID NO: 4363 - protein, 17 aa, Artificial Sequence
  Non-cyclic GFR-binding peptide
  MOD_RES (3)..(4): Xaa is C or S
PTXXVPTRLEPISILYL

SEQ ID NO: 4364 - protein, 9 aa, Artificial Sequence
  Non-cyclic GFR-binding peptide
TEPISMLYL

SEQ ID NO: 4365 - protein, 13 aa, Artificial Sequence
  Non-cyclic GFR-binding peptide
TPTKMSPISMLYK

SEQ ID NO: 4366 - protein, 13 aa, Artificial Sequence
  Non-cyclic GFR-binding peptide
TPTKMSATSMLYY

SEQ ID NO: 4367 - protein, 20 aa, Artificial Sequence
  Non-cyclic GFR-binding peptide
  MOD_RES (6)..(7): Xaa is C or S
STPPTXXVPTRLEPISILYL

SEQ ID NO: 4368 - protein, 10 aa, Artificial Sequence
  Non-cyclic GFR-binding peptide
KMSPISILYK

SEQ ID NO: 4369 - protein, 13 aa, Artificial Sequence
  Non-cyclic GFR-binding peptide
VSQDLSPINILYF

SEQ ID NO: 4370 - protein, 12 aa, Artificial Sequence
  Non-cyclic GFR-binding peptide
PARLSATSILYY

SEQ ID NO: 4371 - protein, 17 aa, Artificial Sequence
  Non-cyclic GFR-binding peptide
  MOD_RES (3)..(4): Xaa is C or S
GPXXTPTKMEPISMLYL

SEQ ID NO: 4372 - protein, 18 aa, Artificial Sequence
  Non-cyclic GFR-binding peptide
  MOD_RES (4)..(5): Xaa is C or S
AGPXXTPTKMSATSMLYY

SEQ ID NO: 4373 - protein, 19 aa, Artificial Sequence
  Non-cyclic GFR-binding peptide
  MOD_RES (5)..(6): Xaa is C or S
VPSTXXAPVKTSPISMLYK

SEQ ID NO: 4374 - protein, 16 aa, Artificial Sequence
  Non-cyclic GFR-binding peptide
  MOD_RES (2)..(3): Xaa is C or S
SXXVPARLSATSILYY

SEQ ID NO: 4375 - protein, 19 aa, Artificial Sequence
  Non-cyclic GFR-binding peptide
  MOD_RES (5)..(6): Xaa is C or S
IPEPXXVPEKMNAISILYF

SEQ ID NO: 4376 - protein, 20 aa, Artificial Sequence
  Non-cyclic GFR-binding peptide
  MOD_RES (6)..(7): Xaa is C or S
HVPKPXXAPTKLEPISVLYL

SEQ ID NO: 4377 - protein, 18 aa, Artificial Sequence
  Non-cyclic GFR-binding peptide
  MOD_RES (4)..(5): Xaa is C or S
PEPXXVPEKMSPISILYK

SEQ ID NO: 4378 - protein, 14 aa, Artificial Sequence
  Non-cyclic GFR-binding peptide
  MOD_RES (1)..(1): Xaa is C or S
XVPTKLSATSILYY

SEQ ID NO: 4379 - protein, 13 aa, Artificial Sequence
  Non-cyclic GFR-binding peptide
VPEKMSPINILYF

SEQ ID NO: 4380 - protein, 10 aa, Artificial Sequence
  Non-cyclic GFR-binding peptide
KMSATSILYY

SEQ ID NO: 4381 - protein, 12 aa, Artificial Sequence
  Non-cyclic GFR-binding peptide
PVKTSPISMLYK

SEQ ID NO: 4382 - protein, 14 aa, Artificial Sequence
  Non-cyclic GFR-binding peptide
  MOD_RES (1)..(1): Xaa is C or S
XVPEKMEPISILYL

SEQ ID NO: 4383 - protein, 17 aa, Artificial Sequence
  Non-cyclic GFR-binding peptide
  MOD_RES (3)..(4): Xaa is C or S
EPXXVPEKMSATSILYY

SEQ ID NO: 4384 - protein, 14 aa, Artificial Sequence
  Non-cyclic GFR-binding peptide
  MOD_RES (1)..(1): Xaa is C or S
XVPEKMNAISILYF

SEQ ID NO: 4385 - protein, 17 aa, Artificial Sequence
  Non-cyclic GFR-binding peptide
  MOD_RES (3)..(4): Xaa is C or S
KAXXVPTKLSATSILYY

SEQ ID NO: 4386 - protein, 11 aa, Artificial Sequence
  Non-cyclic GFR-binding peptide
EKMSPISILYK

SEQ ID NO: 4387 - protein, 13 aa, Artificial Sequence
  Non-cyclic GFR-binding peptide
VPARLSATSILYY

SEQ ID NO: 4388 - protein, 11 aa, Artificial Sequence
  Non-cyclic GFR-binding peptide
TKLSATSILYY

SEQ ID NO: 4389 - protein, 19 aa, Artificial Sequence
  Non-cyclic GFR-binding peptide
  MOD_RES (5)..(6): Xaa is C or S
IPEPXXVPEKMEPISILYL

SEQ ID NO: 4390 - protein, 11 aa, Artificial Sequence
  Non-cyclic GFR-binding peptide
VKTEPISMLYL

SEQ ID NO: 4391 - protein, 16 aa, Artificial Sequence
  Non-cyclic GFR-binding peptide
  MOD_RES (2)..(3): Xaa is C or S
TXXVPTRLSPISILYK

SEQ ID NO: 4392 - protein, 15 aa, Artificial Sequence
  Non-cyclic GFR-binding peptide
  MOD_RES (1)..(2): Xaa is C or S
XXVPEKMSATSILYY

SEQ ID NO: 4393 - protein, 11 aa, Artificial Sequence
  Non-cyclic GFR-binding peptide
EKMSATSILYY

SEQ ID NO: 4394 - protein, 19 aa, Artificial Sequence
  Non-cyclic GFR-binding peptide
  MOD_RES (5)..(6): Xaa is C or S
TPPTXXVPTRLEPISILYL

SEQ ID NO: 4395 - protein, 18 aa, Artificial Sequence
  Non-cyclic GFR-binding peptide
  MOD_RES (4)..(5): Xaa is C or S
AGPXXTPTKMSPISMLYK

SEQ ID NO: 4396 - protein, 14 aa, Artificial Sequence
  Non-cyclic GFR-binding peptide
  MOD_RES (1)..(1): Xaa is C or S
XAPVKTEPISMLYL

SEQ ID NO: 4397 - protein, 18 aa, Artificial Sequence
  Non-cyclic GFR-binding peptide
  MOD_RES (4)..(5): Xaa is C or S
PPTXXVPTRLEPISILYL

SEQ ID NO: 4398 - protein, 15 aa, Artificial Sequence
  Non-cyclic GFR-binding peptide
  MOD_RES (1)..(2): Xaa is C or S
XXAPVKTEPISMLYL

SEQ ID NO: 4399 - protein, 16 aa, Artificial Sequence
  Non-cyclic GFR-binding peptide
  MOD_RES (2)..(3): Xaa is C or S
PXXVPEKMSATSILYY

SEQ ID NO: 4400 - protein, 15 aa, Artificial Sequence
  Non-cyclic GFR-binding peptide
  MOD_RES (1)..(2): Xaa is C or S
XXVPTKLSATSILYY

SEQ ID NO: 4401 - protein, 13 aa, Artificial Sequence
  Non-cyclic GFR-binding peptide
VPTRLEPISILYL

SEQ ID NO: 4402 - protein, 16 aa, Artificial Sequence
  Non-cyclic GFR-binding peptide
  MOD_RES (2)..(3): Xaa is C or S
PXXTPTKMEPISMLYL

SEQ ID NO: 4403 - protein, 20 aa, Artificial Sequence
  Non-cyclic GFR-binding peptide
  MOD_RES (6)..(7): Xaa is C or S
KASKAXXVPTKLSATSILYY

SEQ ID NO: 4404 - protein, 10 aa, Artificial Sequence
  Non-cyclic GFR-binding peptide
KMEPISMLYL

SEQ ID NO: 4405 - protein, 12 aa, Artificial Sequence
  Non-cyclic GFR-binding peptide
PEKMSPINILYF

SEQ ID NO: 4406 - protein, 18 aa, Artificial Sequence
  Non-cyclic GFR-binding peptide
  MOD_RES (4)..(5): Xaa is C or S
PEPXXVPEKMSATSILYY

SEQ ID NO: 4407 - protein, 17 aa, Artificial Sequence
  Non-cyclic GFR-binding peptide
  MOD_RES (3)..(4): Xaa is C or S
STXXAPVKTEPISMLYL

SEQ ID NO: 4408 - protein, 19 aa, Artificial Sequence
  Non-cyclic GFR-binding peptide
  MOD_RES (5)..(6): Xaa is C or S
IPEPXXVPEKMSATSILYY

SEQ ID NO: 4409 - protein, 18 aa, Artificial Sequence
  Non-cyclic GFR-binding peptide
  MOD_RES (4)..(5): Xaa is C or S
PPTXXVPTRLSATSILYY

SEQ ID NO: 4410 - protein, 17 aa, Artificial Sequence
  Non-cyclic GFR-binding peptide
  MOD_RES (3)..(4): Xaa is C or S
EPXXVPEKMEPISILYL

SEQ ID NO: 4411 - protein, 15 aa, Artificial Sequence
  Non-cyclic GFR-binding peptide
  MOD_RES (1)..(2): Xaa is C or S
XXAPVKTSPISMLYK

SEQ ID NO: 4412 - protein, 10 aa, Artificial Sequence
  Non-cyclic GFR-binding peptide
KTSATSMLYY

SEQ ID NO: 4413 - protein, 10 aa, Artificial Sequence
  Non-cyclic GFR-binding peptide
KMSPISMLYK

SEQ ID NO: 4414 - protein, 14 aa, Artificial Sequence
  Non-cyclic GFR-binding peptide
  MOD_RES (1)..(1): Xaa is C or S
XVPTRLEPISILYL

SEQ ID NO: 4415 - protein, 11 aa, Artificial Sequence
  Non-cyclic GFR-binding peptide
VKTSATSMLYY

SEQ ID NO: 4416 - protein, 10 aa, Artificial Sequence
  Non-cyclic GFR-binding peptide
KMEPISILYL

SEQ ID NO: 4417 - protein, 15 aa, Artificial Sequence
  Non-cyclic GFR-binding peptide
  MOD_RES (1)..(2): Xaa is C or S
XXVPEKMNAISILYF

SEQ ID NO: 4418 - protein, 9 aa, Artificial Sequence
  Non-cyclic GFR-binding peptide
MSATSILYY

SEQ ID NO: 4419 - protein, 17 aa, Artificial Sequence
  Non-cyclic GFR-binding peptide
  MOD_RES (3)..(4): Xaa is C or S
GPXXTPTKMSPISMLYK

SEQ ID NO: 4420 - protein, 14 aa, Artificial Sequence
  Non-cyclic GFR-binding peptide
  MOD_RES (1)..(1): Xaa is C or S
XAPVKTSPISMLYK

SEQ ID NO: 4421 - protein, 20 aa, Artificial Sequence
  Non-cyclic GFR-binding peptide
  MOD_RES (6)..(7): Xaa is C or S
GIPEPXXVPEKMEPISILYL

SEQ ID NO: 4422 - protein, 11 aa, Artificial Sequence
  Non-cyclic GFR-binding peptide
QALSPINILYF

SEQ ID NO: 4423 - protein, 19 aa, Artificial Sequence
  Non-cyclic GFR-binding peptide
  MOD_RES (5)..(6): Xaa is C or S
TPPTXXVPTRLSPISILYK

SEQ ID NO: 4424 - protein, 20 aa, Artificial Sequence
  Non-cyclic GFR-binding peptide
  MOD_RES (6)..(7): Xaa is C or S
ASASPXXVSQDLSPINILYF

SEQ ID NO: 4425 - protein, 16 aa, Artificial Sequence
  Non-cyclic GFR-binding peptide
  MOD_RES (2)..(3): Xaa is C or S
PXXVPQDLSPINILYF

SEQ ID NO: 4426 - protein, 19 aa, Artificial Sequence
  Non-cyclic GFR-binding peptide
  MOD_RES (5)..(6): Xaa is C or S
APASXXVPARLSATSILYY

SEQ ID NO: 4427 - protein, 18 aa, Artificial Sequence
  Non-cyclic GFR-binding peptide
  MOD_RES (4)..(5): Xaa is C or S
AGPXXTPTKMEPISMLYL

SEQ ID NO: 4428 - protein, 13 aa, Artificial Sequence
  Non-cyclic GFR-binding peptide
VPEKMSPISILYK

SEQ ID NO: 4429 - protein, 15 aa, Artificial Sequence
  Non-cyclic GFR-binding peptide
  MOD_RES (1)..(2): Xaa is C or S
XXVPEKMSPISILYK

SEQ ID NO: 4430 - protein, 12 aa, Artificial Sequence
  Non-cyclic GFR-binding peptide
PTRLSPISILYK

SEQ ID NO: 4431 - protein, 13 aa, Artificial Sequence
  Non-cyclic GFR-binding peptide
VPEKMNAISILYF

SEQ ID NO: 4432 - protein, 10 aa, Artificial Sequence
  Non-cyclic GFR-binding peptide
KLSATSILYY

SEQ ID NO: 4433 - protein, 20 aa, Artificial Sequence
  Non-cyclic GFR-binding peptide
  MOD_RES (6)..(7): Xaa is C or S
STPPTXXVPTRLSATSILYY

SEQ ID NO: 4434 - protein, 20 aa, Artificial Sequence
  Non-cyclic GFR-binding peptide
  MOD_RES (6)..(7): Xaa is C or S
GIPEPXXVPEKMSPINILYF

SEQ ID NO: 4435 - protein, 19 aa, Artificial Sequence
  Non-cyclic GFR-binding peptide
  MOD_RES (5)..(6): Xaa is C or S
VPSTXXAPVKTEPISMLYL

SEQ ID NO: 4436 - protein, 20 aa, Artificial Sequence
  Non-cyclic GFR-binding peptide
  MOD_RES (6)..(7): Xaa is C or S
RVPSTXXAPVKTSPISMLYK

SEQ ID NO: 4437 - protein, 12 aa, Artificial Sequence
  Non-cyclic GFR-binding peptide
PTKMSATSMLYY

SEQ ID NO: 4438 - protein, 12 aa, Artificial Sequence
  Non-cyclic GFR-binding peptide
PEKMSPISILYK

SEQ ID NO: 4439 - protein, 14 aa, Artificial Sequence
  Non-cyclic GFR-binding peptide
  MOD_RES (1)..(1): Xaa is C or S
XVPEKMSPISILYK

SEQ ID NO: 4440 - protein, 17 aa, Artificial Sequence
  Non-cyclic GFR-binding peptide
  MOD_RES (3)..(4): Xaa is C or S
EPXXVPEKMSPINILYF

SEQ ID NO: 4441 - protein, 18 aa, Artificial Sequence
  Non-cyclic GFR-binding peptide
  MOD_RES (4)..(5): Xaa is C or S
PEPXXVPEKMNAISILYF

SEQ ID NO: 4442 - protein, 15 aa, Artificial Sequence
  Non-cyclic GFR-binding peptide
  MOD_RES (1)..(2): Xaa is C or S
XXVPTRLSPISILYK

SEQ ID NO: 4443 - protein, 12 aa, Artificial Sequence
  Non-cyclic GFR-binding peptide
PQALSPINILYF

SEQ ID NO: 4444 - protein, 9 aa, Artificial Sequence
  Non-cyclic GFR-binding peptide
MEPISMLYL

SEQ ID NO: 4445 - protein, 20 aa, Artificial Sequence
  Non-cyclic GFR-binding peptide
  MOD_RES (6)..(7): Xaa is C or S
GSAGPXXTPTKMSATSMLYY

SEQ ID NO: 4446 - protein, 16 aa, Artificial Sequence
  Non-cyclic GFR-binding peptide
  MOD_RES (2)..(3): Xaa is C or S
PXXVPEKMSPINILYF

SEQ ID NO: 4447 - protein, 11 aa, Artificial Sequence
  Non-cyclic GFR-binding peptide
QDLSPINILYF

SEQ ID NO: 4448 - protein, 13 aa, Artificial Sequence
  Non-cyclic GFR-binding peptide
VPTRLSPISILYK

SEQ ID NO: 4449 - protein, 19 aa, Artificial Sequence
  Non-cyclic GFR-binding peptide
  MOD_RES (5)..(6): Xaa is C or S
ASKAXXVPTKLSATSILYY

SEQ ID NO: 4450 - protein, 12 aa, Artificial Sequence
  Non-cyclic GFR-binding peptide
SQDLSPINILYF

SEQ ID NO: 4451 - protein, 13 aa, Artificial Sequence
  Non-cyclic GFR-binding peptide
APVKTSPISMLYK

SEQ ID NO: 4452 - protein, 20 aa, Artificial Sequence
  Non-cyclic GFR-binding peptide
  MOD_RES (6)..(7): Xaa is C or S
ASAAPXXVPQALSPINILYF

SEQ ID NO: 4453 - protein, 11 aa, Artificial Sequence
  Non-cyclic GFR-binding peptide
TRLSPISILYK

SEQ ID NO: 4454 - protein, 17 aa, Artificial Sequence
  Non-cyclic GFR-binding peptide
  MOD_RES (3)..(4): Xaa is C or S
PTXXVPTRLSPISILYK

SEQ ID NO: 4455 - protein, 19 aa, Artificial Sequence
  Non-cyclic GFR-binding peptide
  MOD_RES (5)..(6): Xaa is C or S
SAGPXXTPTKMSPISMLYK

SEQ ID NO: 4456 - protein, 9 aa, Artificial Sequence
  Non-cyclic GFR-binding peptide
MSATSMLYY

SEQ ID NO: 4457 - protein, 16 aa, Artificial Sequence
  Non-cyclic GFR-binding peptide
  MOD_RES (2)..(3): Xaa is C or S
PXXVPEKMEPISILYL

SEQ ID NO: 4458 - protein, 19 aa, Artificial Sequence
  Non-cyclic GFR-binding peptide
  MOD_RES (5)..(6): Xaa is C or S
IPEPXXVPEKMSPINILYF

SEQ ID NO: 4459 - protein, 15 aa, Artificial Sequence
  Non-cyclic GFR-binding peptide
  MOD_RES (1)..(2): Xaa is C or S
XXTPTKMSATSMLYY

SEQ ID NO: 4460 - protein, 20 aa, Artificial Sequence
  Non-cyclic GFR-binding peptide
  MOD_RES (6)..(7): Xaa is C or S
GSAGPXXTPTKMEPISMLYL

SEQ ID NO: 4461 - protein, 11 aa, Artificial Sequence
  Non-cyclic GFR-binding peptide
TKMEPISMLYL

SEQ ID NO: 4462 - protein, 15 aa, Artificial Sequence
  Non-cyclic GFR-binding peptide
  MOD_RES (1)..(2): Xaa is C or S
XXVPQALSPINILYF

SEQ ID NO: 4463 - protein, 18 aa, Artificial Sequence
  Non-cyclic GFR-binding peptide
  MOD_RES (4)..(5): Xaa is C or S
ASPXXVPQDLSPINILYF

SEQ ID NO: 4464 - protein, 18 aa, Artificial Sequence
  Non-cyclic GFR-binding peptide
  MOD_RES (4)..(5): Xaa is C or S
PSTXXAPVKTSATSMLYY

SEQ ID NO: 4465 - protein, 13 aa, Artificial Sequence
  Non-cyclic GFR-binding peptide
VPEKMEPISILYL

SEQ ID NO: 4466 - protein, 18 aa, Artificial Sequence
  Non-cyclic GFR-binding peptide
  MOD_RES (4)..(5): Xaa is C or S
PASXXVPARLSATSILYY

SEQ ID NO: 4467 - protein, 20 aa, Artificial Sequence
  Non-cyclic GFR-binding peptide
  MOD_RES (6)..(7): Xaa is C or S
HVPKPXXAPTKLSATSVLYY

SEQ ID NO: 4468 - protein, 9 aa, Artificial Sequence
  Non-cyclic GFR-binding peptide
MSPINILYF

SEQ ID NO: 4469 - protein, 18 aa, Artificial Sequence
  Non-cyclic GFR-binding peptide
  MOD_RES (4)..(5): Xaa is C or S
AAPXXVPQALSPINILYF

SEQ ID NO: 4470 - protein, 15 aa, Artificial Sequence
  Non-cyclic GFR-binding peptide
  MOD_RES (1)..(2): Xaa is C or S
XXVPEKMSPINILYF

SEQ ID NO: 4471 - protein, 16 aa, Artificial Sequence
  Non-cyclic GFR-binding peptide
  MOD_RES (2)..(3): Xaa is C or S
AXXVPTKLSATSILYY

SEQ ID NO: 4472 - protein, 19 aa, Artificial Sequence
  Non-cyclic GFR-binding peptide
  MOD_RES (5)..(6): Xaa is C or S
SAGPXXTPTKMSATSMLYY

SEQ ID NO: 4473 - protein, 12 aa, Artificial Sequence
  Non-cyclic GFR-binding peptide
PEKMSATSILYY

SEQ ID NO: 4474 - protein, 11 aa, Artificial Sequence
  Non-cyclic GFR-binding peptide
EKMSPINILYF

SEQ ID NO: 4475 - protein, 11 aa, Artificial Sequence
  Non-cyclic GFR-binding peptide
TRLSATSILYY

SEQ ID NO: 4476 - protein, 20 aa, Artificial Sequence
  Non-cyclic GFR-binding peptide
  MOD_RES (6)..(7): Xaa is C or S
GIPEPXXVPEKMSPISILYK

SEQ ID NO: 4477 - protein, 10 aa, Artificial Sequence
  Non-cyclic GFR-binding peptide
RLSATSILYY

SEQ ID NO: 4478 - protein, 15 aa, Artificial Sequence
  Non-cyclic GFR-binding peptide
  MOD_RES (1)..(2): Xaa is C or S
XXVSQDLSPINILYF

SEQ ID NO: 4479 - protein, 9 aa, Artificial Sequence
  Non-cyclic GFR-binding peptide
MSPISMLYK

SEQ ID NO: 4480 - protein, 9 aa, Artificial Sequence
  Non-cyclic GFR-binding peptide
TSATSMLYY

SEQ ID NO: 4481 - protein, 16 aa, Artificial Sequence
  Non-cyclic GFR-binding peptide
  MOD_RES (2)..(3): Xaa is C or S
PXXVPQALSPINILYF

SEQ ID NO: 4482 - protein, 11 aa, Artificial Sequence
  Non-cyclic GFR-binding peptide
VKTSPISMLYK

SEQ ID NO: 4483 - protein, 12 aa, Artificial Sequence
  Non-cyclic GFR-binding peptide
PEKMEPISILYL

SEQ ID NO: 4484 - protein, 18 aa, Artificial Sequence
  Non-cyclic GFR-binding peptide
  MOD_RES (4)..(5): Xaa is C or S
PSTXXAPVKTSPISMLYK

SEQ ID NO: 4485 - protein, 10 aa, Artificial Sequence
  Non-cyclic GFR-binding peptide
KMSPINILYF

SEQ ID NO: 4486 - protein, 11 aa, Artificial Sequence
  Non-cyclic GFR-binding peptide
TKMSATSMLYY

SEQ ID NO: 4487 - protein, 20 aa, Artificial Sequence
  Non-cyclic GFR-binding peptide
  MOD_RES (6)..(7): Xaa is C or S
RVPSTXXAPVKTEPISMLYL

SEQ ID NO: 4488 - protein, 14 aa, Artificial Sequence
  Non-cyclic GFR-binding peptide
  MOD_RES (1)..(1): Xaa is C or S
XTPTKMSATSMLYY

SEQ ID NO: 4489 - protein, 12 aa, Artificial Sequence
  Non-cyclic GFR-binding peptide
PTKLSATSILYY

SEQ ID NO: 4490 - protein, 16 aa, Artificial Sequence
  Non-cyclic GFR-binding peptide
  MOD_RES (2)..(3): Xaa is C or S
TXXAPVKTSATSMLYY

SEQ ID NO: 4491 - protein, 15 aa, Artificial Sequence
  Non-cyclic GFR-binding peptide
  MOD_RES (1)..(2): Xaa is C or S
XXTPTKMSPISMLYK

SEQ ID NO: 4492 - protein, 16 aa, Artificial Sequence
  Non-cyclic GFR-binding peptide
  MOD_RES (2)..(3): Xaa is C or S
PXXVSQDLSPINILYF

SEQ ID NO: 4493 - protein, 17 aa, Artificial Sequence
  Non-cyclic GFR-binding peptide
  MOD_RES (3)..(4): Xaa is C or S
STXXAPVKTSATSMLYY

SEQ ID NO: 4494 - protein, 13 aa, Artificial Sequence
  Non-cyclic GFR-binding peptide
VPEKMSATSILYY

SEQ ID NO: 4495 - protein, 19 aa, Artificial Sequence
  Non-cyclic GFR-binding peptide
  MOD_RES (5)..(6): Xaa is C or S
SAGPXXTPTKMEPISMLYL

SEQ ID NO: 4496 - protein, 12 aa, Artificial Sequence
  Non-cyclic GFR-binding peptide
PEKMNAISILYF

SEQ ID NO: 4497 - protein, 13 aa, Artificial Sequence
  Non-cyclic GFR-binding peptide
APVKTEPISMLYL

SEQ ID NO: 4498 - protein, 16 aa, Artificial Sequence
  Non-cyclic GFR-binding peptide
  MOD_RES (2)..(3): Xaa is C or S
TXXAPVKTSPISMLYK

SEQ ID NO: 4499 - protein, 17 aa, Artificial Sequence
  Non-cyclic GFR-binding peptide
  MOD_RES (3)..(4): Xaa is C or S
SPXXVSQDLSPINILYF

SEQ ID NO: 4500 - protein, 9 aa, Artificial Sequence
  Non-cyclic GFR-binding peptide
TSPISMLYK

SEQ ID NO: 4501 - protein, 20 aa, Artificial Sequence
  Non-cyclic GFR-binding peptide
  MOD_RES (6)..(7): Xaa is C or S
ASASPXXVPQDLSPINILYF

SEQ ID NO: 4502 - protein, 11 aa, Artificial Sequence
  Non-cyclic GFR-binding peptide
ARLSATSILYY

SEQ ID NO: 4503 - protein, 13 aa, Artificial Sequence
  Non-cyclic GFR-binding peptide
VPTKLSATSILYY

SEQ ID NO: 4504 - protein, 19 aa, Artificial Sequence
  Non-cyclic GFR-binding peptide
  MOD_RES (5)..(6): Xaa is C or S
SAAPXXVPQALSPINILYF

SEQ ID NO: 4505 - protein, 17 aa, Artificial Sequence
  Non-cyclic GFR-binding peptide
  MOD_RES (3)..(4): Xaa is C or S
STXXAPVKTSPISMLYK

SEQ ID NO: 4506 - protein, 15 aa, Artificial Sequence
  Non-cyclic GFR-binding peptide
  MOD_RES (1)..(2): Xaa is C or S
XXVPTRLEPISILYL

SEQ ID NO: 4507 - protein, 14 aa, Artificial Sequence
  Non-cyclic GFR-binding peptide
  MOD_RES (1)..(1): Xaa is C or S
XTPTKMSPISMLYK

SEQ ID NO: 4508 - protein, 14 aa, Artificial Sequence
  Non-cyclic GFR-binding peptide
  MOD_RES (1)..(1): Xaa is C or S
XVPEKMSPINILYF

SEQ ID NO: 4509 - protein, 19 aa, Artificial Sequence
  Non-cyclic GFR-binding peptide
  MOD_RES (14)..(15): Xaa is C or S
MIQITINSLRTPVXXTPPT

SEQ ID NO: 4510 - protein, 14 aa, Artificial Sequence
  Non-cyclic GFR-binding peptide
  MOD_RES (14)..(14): Xaa is C or S
MIQMTINSMKTPTX

SEQ ID NO: 4511 - protein, 9 aa, Artificial Sequence
  Non-cyclic GFR-binding peptide
MIQMTINST

SEQ ID NO: 4512 - protein, 16 aa, Artificial Sequence
  Non-cyclic GFR-binding peptide
  MOD_RES (14)..(15): Xaa is C or S
MIQMTINSTKVPAXXT

SEQ ID NO: 4513 - protein, 12 aa, Artificial Sequence
  Non-cyclic GFR-binding peptide
MIQITINSLRAP

SEQ ID NO: 4514 - protein, 10 aa, Artificial Sequence
  Non-cyclic GFR-binding peptide
MIQITINSLR

SEQ ID NO: 4515 - protein, 11 aa, Artificial Sequence
  Non-cyclic GFR-binding peptide
MIQITINSLRA

SEQ ID NO: 4516 - protein, 13 aa, Artificial Sequence
  Non-cyclic GFR-binding peptide
MIQMTINSTKVPA

SEQ ID NO: 4517 - protein, 18 aa, Artificial Sequence
  Non-cyclic GFR-binding peptide
  MOD_RES (14)..(15): Xaa is C or S
MIQMTINSMKTPTXXPGA

SEQ ID NO: 4518 - protein, 16 aa, Artificial Sequence
  Non-cyclic GFR-binding peptide
  MOD_RES (14)..(15): Xaa is C or S
MIQMTINSMKTPTXXP

SEQ ID NO: 4519 - protein, 15 aa, Artificial Sequence
  Non-cyclic GFR-binding peptide
  MOD_RES (14)..(15): Xaa is C or S
MIQITINSLRAPVXX

SEQ ID NO: 4520 - protein, 13 aa, Artificial Sequence
  Non-cyclic GFR-binding peptide
MIQITINSLRTPV

SEQ ID NO: 4521 - protein, 15 aa, Artificial Sequence
  Non-cyclic GFR-binding peptide
  MOD_RES (14)..(15): Xaa is C or S
MIQMTINSMKTPTXX

SEQ ID NO: 4522 - protein, 16 aa, Artificial Sequence
  Non-cyclic GFR-binding peptide
  MOD_RES (14)..(15): Xaa is C or S
MIQITINSLRAPVXXS

SEQ ID NO: 4523 - protein, 15 aa, Artificial Sequence
  Non-cyclic GFR-binding peptide
  MOD_RES (14)..(15): Xaa is C or S
MIQMTINSTKVPAXX

SEQ ID NO: 4524 - protein, 16 aa, Artificial Sequence
  Non-cyclic GFR-binding peptide
  MOD_RES (14)..(15): Xaa is C or S
MIQITINSLRTPVXXT

SEQ ID NO: 4525 - protein, 15 aa, Artificial Sequence
  Non-cyclic GFR-binding peptide
  MOD_RES (14)..(15): Xaa is C or S
MIQITINSLRTPVXX

SEQ ID NO: 4526 - protein, 18 aa, Artificial Sequence
  Non-cyclic GFR-binding peptide
  MOD_RES (14)..(15): Xaa is C or S
MIQITINSLRTPVXXTPP

SEQ ID NO: 4527 - protein, 10 aa, Artificial Sequence
  Non-cyclic GFR-binding peptide
MIQMTINSMK

SEQ ID NO: 4528 - protein, 17 aa, Artificial Sequence
  Non-cyclic GFR-binding peptide
  MOD_RES (14)..(15): Xaa is C or S
MIQMTINSMKTPTXXPG

SEQ ID NO: 4529 - protein, 13 aa, Artificial Sequence
  Non-cyclic GFR-binding peptide
MIQMTINSMKTPT

SEQ ID NO: 4530 - protein, 19 aa, Artificial Sequence
  Non-cyclic GFR-binding peptide
  MOD_RES (14)..(15): Xaa is C or S
MIQMTINSTKVPAXXTSPV

SEQ ID NO: 4531 - protein, 10 aa, Artificial Sequence
  Non-cyclic GFR-binding peptide
MIQMTINSTK

SEQ ID NO: 4532 - protein, 11 aa, Artificial Sequence
  Non-cyclic GFR-binding peptide
MIQMTINSTKV

SEQ ID NO: 4533 - protein, 17 aa, Artificial Sequence
  Non-cyclic GFR-binding peptide
  MOD_RES (14)..(15): Xaa is C or S
MIQITINSLRAPVXXSA

SEQ ID NO: 4534 - protein, 18 aa, Artificial Sequence
  Non-cyclic GFR-binding peptide
  MOD_RES (14)..(15): Xaa is C or S
MIQMTINSTKVPAXXTSP

SEQ ID NO: 4535 - protein, 17 aa, Artificial Sequence
  Non-cyclic GFR-binding peptide
  MOD_RES (14)..(15): Xaa is C or S
MIQMTINSTKVPAXXTS

SEQ ID NO: 4536 - protein, 20 aa, Artificial Sequence
  Non-cyclic GFR-binding peptide
  MOD_RES (14)..(15): Xaa is C or S
MIQMTINSTKVPAXXTSPVR

SEQ ID NO: 4537 - protein, 14 aa, Artificial Sequence
  Non-cyclic GFR-binding peptide
  MOD_RES (14)..(14): Xaa is C or S
MIQITINSLRTPVX

SEQ ID NO: 4538 - protein, 20 aa, Artificial Sequence
  Non-cyclic GFR-binding peptide
  MOD_RES (14)..(15): Xaa is C or S
MIQMTINSMKTPTXXPGASG

SEQ ID NO: 4539 - protein, 12 aa, Artificial Sequence
  Non-cyclic GFR-binding peptide
MIQMTINSTKVP

SEQ ID NO: 4540 - protein, 12 aa, Artificial Sequence
  Non-cyclic GFR-binding peptide
MIQITINSLRTP

SEQ ID NO: 4541 - protein, 19 aa, Artificial Sequence
  Non-cyclic GFR-binding peptide
  MOD_RES (14)..(15): Xaa is C or S
MIQITINSLRAPVXXSAPA

SEQ ID NO: 4542 - protein, 13 aa, Artificial Sequence
  Non-cyclic GFR-binding peptide
MIQITINSLRAPV

SEQ ID NO: 4543 - protein, 20 aa, Artificial Sequence
  Non-cyclic GFR-binding peptide
  MOD_RES (14)..(15): Xaa is C or S
MIQVTINSLKTPAXXPKPVH

SEQ ID NO: 4544 - protein, 17 aa, Artificial Sequence
  Non-cyclic GFR-binding peptide
  MOD_RES (14)..(15): Xaa is C or S
MIQITINSLRTPVXXTP

SEQ ID NO: 4545 - protein, 9 aa, Artificial Sequence
  Non-cyclic GFR-binding peptide
MIQMTINSM

SEQ ID NO: 4546 - protein, 12 aa, Artificial Sequence
  Non-cyclic GFR-binding peptide
MIQMTINSMKTP

SEQ ID NO: 4547 - protein, 20 aa, Artificial Sequence
  Non-cyclic GFR-binding peptide
  MOD_RES (14)..(15): Xaa is C or S
MIQITINSLRTPVXXTPPTS

SEQ ID NO: 4548 - protein, 14 aa, Artificial Sequence
  Non-cyclic GFR-binding peptide
  MOD_RES (14)..(14): Xaa is C or S
MIQITINSLRAPVX

SEQ ID NO: 4549 - protein, 18 aa, Artificial Sequence
  Non-cyclic GFR-binding peptide
  MOD_RES (14)..(15): Xaa is C or S
MIQITINSLRAPVXXSAP

SEQ ID NO: 4550 - protein, 19 aa, Artificial Sequence
  Non-cyclic GFR-binding peptide
  MOD_RES (14)..(15): Xaa is C or S
MIQMTINSMKTPTXXPGAS

SEQ ID NO: 4551 - protein, 11 aa, Artificial Sequence
  Non-cyclic GFR-binding peptide
MIQMTINSMKT

SEQ ID NO: 4552 - protein, 14 aa, Artificial Sequence
  Non-cyclic GFR-binding peptide
  MOD_RES (14)..(14): Xaa is C or S
MIQMTINSTKVPAX

SEQ ID NO: 4553 - protein, 20 aa, Artificial Sequence
  Non-cyclic GFR-binding peptide
  MOD_RES (14)..(15): Xaa is C or S
MIQITINSLRAPVXXSAPAA

SEQ ID NO: 4554 - protein, 11 aa, Artificial Sequence
  Non-cyclic GFR-binding peptide
MIQITINSLRT

SEQ ID NO: 4555 - protein, 19 aa, Artificial Sequence
  Non-cyclic GFR-binding peptide
  MOD_RES (5)..(6): Xaa is C or S
TPPTXXVPTRLSNITIQIM

SEQ ID NO: 4556 - protein, 14 aa, Artificial Sequence
  Non-cyclic GFR-binding peptide
  MOD_RES (1)..(1): Xaa is C or S
XTPTKMSNITMQIM

SEQ ID NO: 4557 - protein, 9 aa, Artificial Sequence
  Non-cyclic GFR-binding peptide
TSNITMQIM

SEQ ID NO: 4558 - protein, 16 aa, Artificial Sequence
  Non-cyclic GFR-binding peptide
  MOD_RES (2)..(3): Xaa is C or S
TXXAPVKTSNITMQIM

SEQ ID NO: 4559 - protein, 12 aa, Artificial Sequence
  Non-cyclic GFR-binding peptide
PARLSNITIQIM

SEQ ID NO: 4560 - protein, 10 aa, Artificial Sequence
  Non-cyclic GFR-binding peptide
RLSNITIQIM

SEQ ID NO: 4561 - protein, 11 aa, Artificial Sequence
  Non-cyclic GFR-binding peptide
ARLSNITIQIM

SEQ ID NO: 4562 - protein, 13 aa, Artificial Sequence
  Non-cyclic GFR-binding peptide
APVKTSNITMQIM

SEQ ID NO: 4563 - protein, 18 aa, Artificial Sequence
  Non-cyclic GFR-binding peptide
  MOD_RES (4)..(5): Xaa is C or S
AGPXXTPTKMSNITMQIM

SEQ ID NO: 4564 - protein, 16 aa, Artificial Sequence
  Non-cyclic GFR-binding peptide
  MOD_RES (2)..(3): Xaa is C or S
PXXTPTKMSNITMQIM

SEQ ID NO: 4565 - protein, 15 aa, Artificial Sequence
  Non-cyclic GFR-binding peptide
  MOD_RES (1)..(2): Xaa is C or S
XXVPARLSNITIQIM

SEQ ID NO: 4566 - protein, 13 aa, Artificial Sequence
  Non-cyclic GFR-binding peptide
VPTRLSNITIQIM

SEQ ID NO: 4567 - protein, 15 aa, Artificial Sequence
  Non-cyclic GFR-binding peptide
  MOD_RES (1)..(2): Xaa is C or S
XXTPTKMSNITMQIM

SEQ ID NO: 4568 - protein, 16 aa, Artificial Sequence
  Non-cyclic GFR-binding peptide
  MOD_RES (2)..(3): Xaa is C or S
SXXVPARLSNITIQIM

SEQ ID NO: 4569 - protein, 15 aa, Artificial Sequence
  Non-cyclic GFR-binding peptide
  MOD_RES (1)..(2): Xaa is C or S
XXAPVKTSNITMQIM

SEQ ID NO: 4570 - protein, 16 aa, Artificial Sequence
  Non-cyclic GFR-binding peptide
  MOD_RES (2)..(3): Xaa is C or S
TXXVPTRLSNITIQIM

SEQ ID NO: 4571 - protein, 15 aa, Artificial Sequence
  Non-cyclic GFR-binding peptide
  MOD_RES (1)..(2): Xaa is C or S
XXVPTRLSNITIQIM

SEQ ID NO: 4572 - protein, 18 aa, Artificial Sequence
  Non-cyclic GFR-binding peptide
  MOD_RES (4)..(5): Xaa is C or S
PPTXXVPTRLSNITIQIM

SEQ ID NO: 4573 - protein, 10 aa, Artificial Sequence
  Non-cyclic GFR-binding peptide
KMSNITMQIM

SEQ ID NO: 4574 - protein, 17 aa, Artificial Sequence
  Non-cyclic GFR-binding peptide
  MOD_RES (3)..(4): Xaa is C or S
GPXXTPTKMSNITMQIM

SEQ ID NO: 4575 - protein, 13 aa, Artificial Sequence
  Non-cyclic GFR-binding peptide
TPTKMSNITMQIM

SEQ ID NO: 4576 - protein, 19 aa, Artificial Sequence
  Non-cyclic GFR-binding peptide
  MOD_RES (5)..(6): Xaa is C or S
VPSTXXAPVKTSNITMQIM

SEQ ID NO: 4577 - protein, 10 aa, Artificial Sequence
  Non-cyclic GFR-binding peptide
KTSNITMQIM

SEQ ID NO: 4578 - protein, 11 aa, Artificial Sequence
  Non-cyclic GFR-binding peptide
VKTSNITMQIM

SEQ ID NO: 4579 - protein, 17 aa, Artificial Sequence
  Non-cyclic GFR-binding peptide
  MOD_RES (3)..(4): Xaa is C or S
ASXXVPARLSNITIQIM

SEQ ID NO: 4580 - protein, 18 aa, Artificial Sequence
  Non-cyclic GFR-binding peptide
  MOD_RES (4)..(5): Xaa is C or S
PSTXXAPVKTSNITMQIM

SEQ ID NO: 4581 - protein, 17 aa, Artificial Sequence
  Non-cyclic GFR-binding peptide
  MOD_RES (3)..(4): Xaa is C or S
STXXAPVKTSNITMQIM

SEQ ID NO: 4582 - protein, 20 aa, Artificial Sequence
  Non-cyclic GFR-binding peptide
  MOD_RES (6)..(7): Xaa is C or S
RVPSTXXAPVKTSNITMQIM

SEQ ID NO: 4583 - protein, 14 aa, Artificial Sequence
  Non-cyclic GFR-binding peptide
  MOD_RES (1)..(1): Xaa is C or S
XVPTRLSNITIQIM

SEQ ID NO: 4584 - protein, 20 aa, Artificial Sequence
  Non-cyclic GFR-binding peptide
  MOD_RES (6)..(7): Xaa is C or S
GSAGPXXTPTKMSNITMQIM

SEQ ID NO: 4585 - protein, 12 aa, Artificial Sequence
  Non-cyclic GFR-binding peptide
PVKTSNITMQIM

SEQ ID NO: 4586 - protein, 12 aa, Artificial Sequence
  Non-cyclic GFR-binding peptide
PTRLSNITIQIM

SEQ ID NO: 4587 - protein, 19 aa, Artificial Sequence
  Non-cyclic GFR-binding peptide
  MOD_RES (5)..(6): Xaa is C or S
APASXXVPARLSNITIQIM

SEQ ID NO: 4588 - protein, 13 aa, Artificial Sequence
  Non-cyclic GFR-binding peptide
VPARLSNITIQIM

SEQ ID NO: 4589 - protein, 20 aa, Artificial Sequence
  Non-cyclic GFR-binding peptide
  MOD_RES (6)..(7): Xaa is C or S
HVPKPXXAPTKLSNITVQIM

SEQ ID NO: 4590 - protein, 17 aa, Artificial Sequence
  Non-cyclic GFR-binding peptide
  MOD_RES (3)..(4): Xaa is C or S
PTXXVPTRLSNITIQIM

SEQ ID NO: 4591 - protein, 9 aa, Artificial Sequence
  Non-cyclic GFR-binding peptide
MSNITMQIM

SEQ ID NO: 4592 - protein, 12 aa, Artificial Sequence
  Non-cyclic GFR-binding peptide
PTKMSNITMQIM

SEQ ID NO: 4593 - protein, 20 aa, Artificial Sequence
  Non-cyclic GFR-binding peptide
  MOD_RES (6)..(7): Xaa is C or S
STPPTXXVPTRLSNITIQIM

SEQ ID NO: 4594 - protein, 14 aa, Artificial Sequence
  Non-cyclic GFR-binding peptide
  MOD_RES (1)..(1): Xaa is C or S
XVPARLSNITIQIM

SEQ ID NO: 4595 - protein, 18 aa, Artificial Sequence
  Non-cyclic GFR-binding peptide
  MOD_RES (4)..(5): Xaa is C or S
PASXXVPARLSNITIQIM

SEQ ID NO: 4596 - protein, 19 aa, Artificial Sequence
  Non-cyclic GFR-binding peptide
  MOD_RES (5)..(6): Xaa is C or S
SAGPXXTPTKMSNITMQIM

SEQ ID NO: 4597 - protein, 11 aa, Artificial Sequence
  Non-cyclic GFR-binding peptide
TKMSNITMQIM

SEQ ID NO: 4598 - protein, 14 aa, Artificial Sequence
  Non-cyclic GFR-binding peptide
  MOD_RES (1)..(1): Xaa is C or S
XAPVKTSNITMQIM

SEQ ID NO: 4599 - protein, 20 aa, Artificial Sequence
  Non-cyclic GFR-binding peptide
  MOD_RES (6)..(7): Xaa is C or S
AAPASXXVPARLSNITIQIM

SEQ ID NO: 4600 - protein, 11 aa, Artificial Sequence
  Non-cyclic GFR-binding peptide
TRLSNITIQIM

SEQ ID NO: 4601 - protein, 16 aa, Artificial Sequence
  Non-cyclic GFR-binding peptide
  MOD_RES (14)..(15): Xaa is C or S
LYLMSIASMKTPTXXP

SEQ ID NO: 4602 - protein, 13 aa, Artificial Sequence
  Non-cyclic GFR-binding peptide
LYLISIASLKTPV

SEQ ID NO: 4603 - protein, 15 aa, Artificial Sequence
  Non-cyclic GFR-binding peptide
  MOD_RES (14)..(15): Xaa is C or S
LYLISIASLRAPVXX

SEQ ID NO: 4604 - protein, 19 aa, Artificial Sequence
  Non-cyclic GFR-binding peptide
  MOD_RES (14)..(15): Xaa is C or S
LYLISIASMKEPVXXPEPI

SEQ ID NO: 4605 - protein, 14 aa, Artificial Sequence
  Non-cyclic GFR-binding peptide
  MOD_RES (14)..(14): Xaa is C or S
LYLISIASMKEPVX

SEQ ID NO: 4606 - protein, 18 aa, Artificial Sequence
  Non-cyclic GFR-binding peptide
  MOD_RES (14)..(15): Xaa is C or S
LYLISIASLRAPVXXSAP

SEQ ID NO: 4607 - protein, 18 aa, Artificial Sequence
  Non-cyclic GFR-binding peptide
  MOD_RES (14)..(15): Xaa is C or S
LYLISIASMKEPVXXPEP

SEQ ID NO: 4608 - protein, 18 aa, Artificial Sequence
  Non-cyclic GFR-binding peptide
  MOD_RES (14)..(15): Xaa is C or S
LYLMSIASMKTPTXXPGA

SEQ ID NO: 4609 - protein, 14 aa, Artificial Sequence
  Non-cyclic GFR-binding peptide
  MOD_RES (14)..(14): Xaa is C or S
LYLMSIASTKVPAX

SEQ ID NO: 4610 - protein, 10 aa, Artificial Sequence
  Non-cyclic GFR-binding peptide
LYLISIASLK

SEQ ID NO: 4611 - protein, 9 aa, Artificial Sequence
  Non-cyclic GFR-binding peptide
LYLMSIASM

SEQ ID NO: 4612 - protein, 20 aa, Artificial Sequence
  Non-cyclic GFR-binding peptide
  MOD_RES (14)..(15): Xaa is C or S
LYLMSIASTKVPAXXTSPVR

SEQ ID NO: 4613 - protein, 12 aa, Artificial Sequence
  Non-cyclic GFR-binding peptide
LYLISIASMKEP

SEQ ID NO: 4614 - protein, 13 aa, Artificial Sequence
  Non-cyclic GFR-binding peptide
LYLISIASLRAPV

SEQ ID NO: 4615 - protein, 20 aa, Artificial Sequence
  Non-cyclic GFR-binding peptide
  MOD_RES (14)..(15): Xaa is C or S
LYLVSIASLKTPAXXPKPVH

SEQ ID NO: 4616 - protein, 20 aa, Artificial Sequence
  Non-cyclic GFR-binding peptide
  MOD_RES (14)..(15): Xaa is C or S
LYLMSIASMKTPTXXPGASG

SEQ ID NO: 4617 - protein, 16 aa, Artificial Sequence
  Non-cyclic GFR-binding peptide
  MOD_RES (14)..(15): Xaa is C or S
LYLISIASLKTPVXXA

SEQ ID NO: 4618 - protein, 15 aa, Artificial Sequence
  Non-cyclic GFR-binding peptide
  MOD_RES (14)..(15): Xaa is C or S
LYLISIASMKEPVXX

SEQ ID NO: 4619 - protein, 11 aa, Artificial Sequence
  Non-cyclic GFR-binding peptide
LYLMSIASTKV

SEQ ID NO: 4620 - protein, 19 aa, Artificial Sequence
  Non-cyclic GFR-binding peptide
  MOD_RES (14)..(15): Xaa is C or S
LYLISIASLRAPVXXSAPA

SEQ ID NO: 4621 - protein, 19 aa, Artificial Sequence
  Non-cyclic GFR-binding peptide
  MOD_RES (14)..(15): Xaa is C or S
LYLMSIASTKVPAXXTSPV

SEQ ID NO: 4622 - protein, 13 aa, Artificial Sequence
  Non-cyclic GFR-binding peptide
LYLMSIASMKTPT

SEQ ID NO: 4623 - protein, 17 aa, Artificial Sequence
  Non-cyclic GFR-binding peptide
  MOD_RES (14)..(15): Xaa is C or S
LYLMSIASMKTPTXXPG

SEQ ID NO: 4624 - protein, 12 aa, Artificial Sequence
  Non-cyclic GFR-binding peptide
LYLISIASLKTP

SEQ ID NO: 4625 - protein, 13 aa, Artificial Sequence
  Non-cyclic GFR-binding peptide
LYLISIASMKEPV

SEQ ID NO: 4626 - protein, 10 aa, Artificial Sequence
  Non-cyclic GFR-binding peptide
LYLMSIASTK

SEQ ID NO: 4627 - protein, 15 aa, Artificial Sequence
  Non-cyclic GFR-binding peptide
  MOD_RES (14)..(15): Xaa is C or S
LYLMSIASMKTPTXX

SEQ ID NO: 4628 - protein, 9 aa, Artificial Sequence
  Non-cyclic GFR-binding peptide
LYLISIASM

SEQ ID NO: 4629 - protein, 14 aa, Artificial Sequence
  Non-cyclic GFR-binding peptide
  MOD_RES (14)..(14): Xaa is C or S
LYLISIASLKTPVX

SEQ ID NO: 4630 - protein, 10 aa, Artificial Sequence
  Non-cyclic GFR-binding peptide
LYLISIASMK

SEQ ID NO: 4631 - protein, 20 aa, Artificial Sequence
  Non-cyclic GFR-binding peptide
  MOD_RES (14)..(15): Xaa is C or S
LYLISIASMKEPVXXPEPIG

SEQ ID NO: 4632 - protein, 9 aa, Artificial Sequence
  Non-cyclic GFR-binding peptide
LYLMSIAST

SEQ ID NO: 4633 - protein, 11 aa, Artificial Sequence
  Non-cyclic GFR-binding peptide
LYLISIASLRA

SEQ ID NO: 4634 - protein, 20 aa, Artificial Sequence
  Non-cyclic GFR-binding peptide
  MOD_RES (14)..(15): Xaa is C or S
LYLISIASLRAPVXXSAPAA

SEQ ID NO: 4635 - protein, 16 aa, Artificial Sequence
  Non-cyclic GFR-binding peptide
  MOD_RES (14)..(15): Xaa is C or S
LYLISIASLRAPVXXS

SEQ ID NO: 4636 - protein, 17 aa, Artificial Sequence
  Non-cyclic GFR-binding peptide
  MOD_RES (14)..(15): Xaa is C or S
LYLISIASLKTPVXXAK

SEQ ID NO: 4637 - protein, 14 aa, Artificial Sequence
  Non-cyclic GFR-binding peptide
  MOD_RES (14)..(14): Xaa is C or S
LYLMSIASMKTPTX

SEQ ID NO: 4638 - protein, 12 aa, Artificial Sequence
  Non-cyclic GFR-binding peptide
LYLMSIASMKTP

SEQ ID NO: 4639 - protein, 20 aa, Artificial Sequence
  Non-cyclic GFR-binding peptide
  MOD_RES (14)..(15): Xaa is C or S
LYLISIASLKTPVXXAKSAK

SEQ ID NO: 4640 - protein, 11 aa, Artificial Sequence
  Non-cyclic GFR-binding peptide
LYLMSIASMKT

SEQ ID NO: 4641 - protein, 17 aa, Artificial Sequence
  Non-cyclic GFR-binding peptide
  MOD_RES (14)..(15): Xaa is C or S
LYLISIASLRAPVXXSA

SEQ ID NO: 4642 - protein, 12 aa, Artificial Sequence
  Non-cyclic GFR-binding peptide
LYLISIASLRAP

SEQ ID NO: 4643 - protein, 19 aa, Artificial Sequence
  Non-cyclic GFR-binding peptide
  MOD_RES (14)..(15): Xaa is C or S
LYLISIASLKTPVXXAKSA

SEQ ID NO: 4644 - protein, 14 aa, Artificial Sequence
  Non-cyclic GFR-binding peptide
  MOD_RES (14)..(14): Xaa is C or S
LYLISIASLRAPVX

SEQ ID NO: 4645 - protein, 19 aa, Artificial Sequence
  Non-cyclic GFR-binding peptide
  MOD_RES (14)..(15): Xaa is C or S
LYLMSIASMKTPTXXPGAS

SEQ ID NO: 4646 - protein, 16 aa, Artificial Sequence
  Non-cyclic GFR-binding peptide
  MOD_RES (14)..(15): Xaa is C or S
LYLISIASMKEPVXXP

SEQ ID NO: 4647 - protein, 10 aa, Artificial Sequence
  Non-cyclic GFR-binding peptide
LYLMSIASMK

SEQ ID NO: 4648 - protein, 15 aa, Artificial Sequence
  Non-cyclic GFR-binding peptide
  MOD_RES (14)..(15): Xaa is C or S
LYLISIASLKTPVXX

SEQ ID NO: 4649 - protein, 11 aa, Artificial Sequence
  Non-cyclic GFR-binding peptide
LYLISIASMKE

SEQ ID NO: 4650 - protein, 17 aa, Artificial Sequence
  Non-cyclic GFR-binding peptide
  MOD_RES (14)..(15): Xaa is C or S
LYLMSIASTKVPAXXTS

SEQ ID NO: 4651 - protein, 11 aa, Artificial Sequence
  Non-cyclic GFR-binding peptide
LYLISIASLKT

SEQ ID NO: 4652 - protein, 13 aa, Artificial Sequence
  Non-cyclic GFR-binding peptide
LYLMSIASTKVPA

SEQ ID NO: 4653 - protein, 12 aa, Artificial Sequence
  Non-cyclic GFR-binding peptide
LYLMSIASTKVP

SEQ ID NO: 4654 - protein, 18 aa, Artificial Sequence
  Non-cyclic GFR-binding peptide
  MOD_RES (14)..(15): Xaa is C or S
LYLMSIASTKVPAXXTSP

SEQ ID NO: 4655 - protein, 15 aa, Artificial Sequence
  Non-cyclic GFR-binding peptide
  MOD_RES (14)..(15): Xaa is C or S
LYLMSIASTKVPAXX

SEQ ID NO: 4656 - protein, 17 aa, Artificial Sequence
  Non-cyclic GFR-binding peptide
  MOD_RES (14)..(15): Xaa is C or S
LYLISIASMKEPVXXPE

SEQ ID NO: 4657 - protein, 18 aa, Artificial Sequence
  Non-cyclic GFR-binding peptide
  MOD_RES (14)..(15): Xaa is C or S
LYLISIASLKTPVXXAKS

SEQ ID NO: 4658 - protein, 16 aa, Artificial Sequence
  Non-cyclic GFR-binding peptide
  MOD_RES (14)..(15): Xaa is C or S
LYLMSIASTKVPAXXT

SEQ ID NO: 4659 - protein, 16 aa, Artificial Sequence
  Non-cyclic GFR-binding peptide
  MOD_RES (2)..(3): Xaa is C or S
PXXTPTKMSAISMLYL

SEQ ID NO: 4660 - protein, 13 aa, Artificial Sequence
  Non-cyclic GFR-binding peptide
VPTKLSAISILYL

SEQ ID NO: 4661 - protein, 15 aa, Artificial Sequence
  Non-cyclic GFR-binding peptide
  MOD_RES (1)..(2): Xaa is C or S
XXVPARLSAISILYL

SEQ ID NO: 4662 - protein, 19 aa, Artificial Sequence
  Non-cyclic GFR-binding peptide
  MOD_RES (5)..(6): Xaa is C or S
IPEPXXVPEKMSAISILYL

SEQ ID NO: 4663 - protein, 14 aa, Artificial Sequence
  Non-cyclic GFR-binding peptide
  MOD_RES (1)..(1): Xaa is C or S
XVPEKMSAISILYL

SEQ ID NO: 4664 - protein, 18 aa, Artificial Sequence
  Non-cyclic GFR-binding peptide
  MOD_RES (4)..(5): Xaa is C or S
PASXXVPARLSAISILYL

SEQ ID NO: 4665 - protein, 18 aa, Artificial Sequence
  Non-cyclic GFR-binding peptide
  MOD_RES (4)..(5): Xaa is C or S
PEPXXVPEKMSAISILYL

SEQ ID NO: 4666 - protein, 18 aa, Artificial Sequence
  Non-cyclic GFR-binding peptide
  MOD_RES (4)..(5): Xaa is C or S
AGPXXTPTKMSAISMLYL

SEQ ID NO: 4667 - protein, 14 aa, Artificial Sequence
  Non-cyclic GFR-binding peptide
  MOD_RES (1)..(1): Xaa is C or S
XAPVKTSAISMLYL

SEQ ID NO: 4668 - protein, 10 aa, Artificial Sequence
  Non-cyclic GFR-binding peptide
KLSAISILYL

SEQ ID NO: 4669 - protein, 9 aa, Artificial Sequence
  Non-cyclic GFR-binding peptide
MSAISMLYL

SEQ ID NO: 4670 - protein, 20 aa, Artificial Sequence
  Non-cyclic GFR-binding peptide
  MOD_RES (6)..(7): Xaa is C or S
RVPSTXXAPVKTSAISMLYL

SEQ ID NO: 4671 - protein, 12 aa, Artificial Sequence
  Non-cyclic GFR-binding peptide
PEKMSAISILYL

SEQ ID NO: 4672 - protein, 13 aa, Artificial Sequence
  Non-cyclic GFR-binding peptide
VPARLSAISILYL

SEQ ID NO: 4673 - protein, 20 aa, Artificial Sequence
  Non-cyclic GFR-binding peptide
  MOD_RES (6)..(7): Xaa is C or S
HVPKPXXAPTKLSAISVLYL

SEQ ID NO: 4674 - protein, 20 aa, Artificial Sequence
  Non-cyclic GFR-binding peptide
  MOD_RES (6)..(7): Xaa is C or S
GSAGPXXTPTKMSAISMLYL

SEQ ID NO: 4675 - protein, 16 aa, Artificial Sequence
  Non-cyclic GFR-binding peptide
  MOD_RES (2)..(3): Xaa is C or S
AXXVPTKLSAISILYL

SEQ ID NO: 4676 - protein, 15 aa, Artificial Sequence
  Non-cyclic GFR-binding peptide
  MOD_RES (1)..(2): Xaa is C or S
XXVPEKMSAISILYL

SEQ ID NO: 4677 - protein, 11 aa, Artificial Sequence
  Non-cyclic GFR-binding peptide
VKTSAISMLYL

SEQ ID NO: 4678 - protein, 19 aa, Artificial Sequence
  Non-cyclic GFR-binding peptide
  MOD_RES (5)..(6): Xaa is C or S
APASXXVPARLSAISILYL

SEQ ID NO: 4679 - protein, 19 aa, Artificial Sequence
  Non-cyclic GFR-binding peptide
  MOD_RES (5)..(6): Xaa is C or S
VPSTXXAPVKTSAISMLYL

SEQ ID NO: 4680 - protein, 13 aa, Artificial Sequence
  Non-cyclic GFR-binding peptide
TPTKMSAISMLYL

SEQ ID NO: 4681 - protein, 17 aa, Artificial Sequence
  Non-cyclic GFR-binding peptide
  MOD_RES (3)..(4): Xaa is C or S
GPXXTPTKMSAISMLYL

SEQ ID NO: 4682 - protein, 12 aa, Artificial Sequence
  Non-cyclic GFR-binding peptide
PTKLSAISILYL

SEQ ID NO: 4683 - protein, 13 aa, Artificial Sequence
  Non-cyclic GFR-binding peptide
VPEKMSAISILYL

SEQ ID NO: 4684 - protein, 10 aa, Artificial Sequence
  Non-cyclic GFR-binding peptide
KTSAISMLYL

SEQ ID NO: 4685 - protein, 15 aa, Artificial Sequence
  Non-cyclic GFR-binding peptide
  MOD_RES (1)..(2): Xaa is C or S
XXTPTKMSAISMLYL

SEQ ID NO: 4686 - protein, 9 aa, Artificial Sequence
  Non-cyclic GFR-binding peptide
MSAISILYL

SEQ ID NO: 4687 - protein, 14 aa, Artificial Sequence
  Non-cyclic GFR-binding peptide
  MOD_RES (1)..(1): Xaa is C or S
XVPTKLSAISILYL

SEQ ID NO: 4688 - protein, 10 aa, Artificial Sequence
  Non-cyclic GFR-binding peptide
KMSAISILYL

SEQ ID NO: 4689 - protein, 20 aa, Artificial Sequence
  Non-cyclic GFR-binding peptide
  MOD_RES (6)..(7): Xaa is C or S
GIPEPXXVPEKMSAISILYL

SEQ ID NO: 4690 - protein, 9 aa, Artificial Sequence
  Non-cyclic GFR-binding peptide
TSAISMLYL

SEQ ID NO: 4691 - protein, 11 aa, Artificial Sequence
  Non-cyclic GFR-binding peptide
ARLSAISILYL

SEQ ID NO: 4692 - protein, 20 aa, Artificial Sequence
  Non-cyclic GFR-binding peptide
  MOD_RES (6)..(7): Xaa is C or S
AAPASXXVPARLSAISILYL

SEQ ID NO: 4693 - protein, 16 aa, Artificial Sequence
  Non-cyclic GFR-binding peptide
  MOD_RES (2)..(3): Xaa is C or S
SXXVPARLSAISILYL

SEQ ID NO: 4694 - protein, 17 aa, Artificial Sequence
  Non-cyclic GFR-binding peptide
  MOD_RES (3)..(4): Xaa is C or S
KAXXVPTKLSAISILYL

SEQ ID NO: 4695 - protein, 14 aa, Artificial Sequence
  Non-cyclic GFR-binding peptide
  MOD_RES (1)..(1): Xaa is C or S
XTPTKMSAISMLYL

SEQ ID NO: 4696 - protein, 12 aa, Artificial Sequence
  Non-cyclic GFR-binding peptide
PTKMSAISMLYL

SEQ ID NO: 4697 - protein, 20 aa, Artificial Sequence
  Non-cyclic GFR-binding peptide
  MOD_RES (6)..(7): Xaa is C or S
KASKAXXVPTKLSAISILYL

SEQ ID NO: 4698 - protein, 11 aa, Artificial Sequence
  Non-cyclic GFR-binding peptide
TKMSAISMLYL

SEQ ID NO: 4699 - protein, 17 aa, Artificial Sequence
  Non-cyclic GFR-binding peptide
  MOD_RES (3)..(4): Xaa is C or S
ASXXVPARLSAISILYL

SEQ ID NO: 4700 - protein, 12 aa, Artificial Sequence
  Non-cyclic GFR-binding peptide
PARLSAISILYL

SEQ ID NO: 4701 - protein, 19 aa, Artificial Sequence
  Non-cyclic GFR-binding peptide
  MOD_RES (5)..(6): Xaa is C or S
ASKAXXVPTKLSAISILYL

SEQ ID NO: 4702 - protein, 14 aa, Artificial Sequence
  Non-cyclic GFR-binding peptide
  MOD_RES (1)..(1): Xaa is C or S
XVPARLSAISILYL

SEQ ID NO: 4703 - protein, 19 aa, Artificial Sequence
  Non-cyclic GFR-binding peptide
  MOD_RES (5)..(6): Xaa is C or S
SAGPXXTPTKMSAISMLYL

SEQ ID NO: 4704 - protein, 16 aa, Artificial Sequence
  Non-cyclic GFR-binding peptide
  MOD_RES (2)..(3): Xaa is C or S
PXXVPEKMSAISILYL

SEQ ID NO: 4705 - protein, 10 aa, Artificial Sequence
  Non-cyclic GFR-binding peptide
KMSAISMLYL

SEQ ID NO: 4706 - protein, 15 aa, Artificial Sequence
  Non-cyclic GFR-binding peptide
  MOD_RES (1)..(2): Xaa is C or S
XXVPTKLSAISILYL

SEQ ID NO: 4707 - protein, 11 aa, Artificial Sequence
  Non-cyclic GFR-binding peptide
EKMSAISILYL

SEQ ID NO: 4708 - protein, 17 aa, Artificial Sequence
  Non-cyclic GFR-binding peptide
  MOD_RES (3)..(4): Xaa is C or S
STXXAPVKTSAISMLYL

SEQ ID NO: 4709 - protein, 11 aa, Artificial Sequence
  Non-cyclic GFR-binding peptide
TKLSAISILYL

SEQ ID NO: 4710 - protein, 13 aa, Artificial Sequence
  Non-cyclic GFR-binding peptide
APVKTSAISMLYL

SEQ ID NO: 4711 - protein, 12 aa, Artificial Sequence
  Non-cyclic GFR-binding peptide
PVKTSAISMLYL

SEQ ID NO: 4712 - protein, 18 aa, Artificial Sequence
  Non-cyclic GFR-binding peptide
  MOD_RES (4)..(5): Xaa is C or S
PSTXXAPVKTSAISMLYL

SEQ ID NO: 4713 - protein, 15 aa, Artificial Sequence
  Non-cyclic GFR-binding peptide
  MOD_RES (1)..(2): Xaa is C or S
XXAPVKTSAISMLYL

SEQ ID NO: 4714 - protein, 17 aa, Artificial Sequence
  Non-cyclic GFR-binding peptide
  MOD_RES (3)..(4): Xaa is C or S
EPXXVPEKMSAISILYL

SEQ ID NO: 4715 - protein, 18 aa, Artificial Sequence
  Non-cyclic GFR-binding peptide
  MOD_RES (4)..(5): Xaa is C or S
SKAXXVPTKLSAISILYL

SEQ ID NO: 4716 - protein, 16 aa, Artificial Sequence
  Non-cyclic GFR-binding peptide
  MOD_RES (2)..(3): Xaa is C or S
TXXAPVKTSAISMLYL

SEQ ID NO: 4717 - protein, 43 aa, Artificial Sequence
  Cyclic GFR-binding peptide
GGGGGGGGGDENEKVVNDEGLESVPEDLSSLSVLFFDENEKVV

SEQ ID NO: 4718 - protein, 43 aa, Artificial Sequence
  Cyclic GFR-binding peptide
GGGGGGGGGDDSSNVIRVPSTSSVPTGQSAISTLYLDDSSNVI

SEQ ID NO: 4719 - protein, 43 aa, Artificial Sequence
  Cyclic GFR-binding peptide
GGGGGGGGGDDSSNVIRVPSTSSAPTKMNAISMLYFDENEKVV

SEQ ID NO: 4720 - protein, 43 aa, Artificial Sequence
  Cyclic GFR-binding peptide
GGGGGGGGGDENEKVVGIPEPSSAPVDLKPLSTLYVDENEKVV

SEQ ID NO: 4721 - protein, 43 aa, Artificial Sequence
  Cyclic GFR-binding peptide
AAAAAAAAADENEKVVAASKASSVPQEEEPLPMVYYDAANNVV

SEQ ID NO: 4722 - protein, 43 aa, Artificial Sequence
  Cyclic GFR-binding peptide
GGGGGGGGGDDSSNVIKIPKASSVPTGGSNITVQIMDDSSNVI

SEQ ID NO: 4723 - protein, 43 aa, Artificial Sequence
  Cyclic GFR-binding peptide
AAAAAAAAADENEKVVAASKASSSRVELRSVKIAKVDDSSNVI

SEQ ID NO: 4724 - protein, 43 aa, Artificial Sequence
  Cyclic GFR-binding peptide
GGGGGGGGGDENEKVVKIPKASSTQVRLRPVQIRKIDAANNVV

SEQ ID NO: 4725 - protein, 43 aa, Artificial Sequence
  Cyclic GFR-binding peptide
GGGGGGGGGDDSSNVISTPPTSSSRVQLSAISMLYLDDSSNVI

SEQ ID NO: 4726 - protein, 43 aa, Artificial Sequence
  Cyclic GFR-binding peptide
GGGGGGGGGDENEKVVRVPSTSSTQVKMSAISMLYLDENEKVV

SEQ ID NO: 4727 - protein, 43 aa, Artificial Sequence
  Cyclic GFR-binding peptide
AAAAAAAAADAANNVVKIPKASSSRVRLSSLSTLFFDAANNVV

SEQ ID NO: 4728 - protein, 43 aa, Artificial Sequence
  Cyclic GFR-binding peptide
GGGGGGGGGDDSSNVIAASKASSTPTDLNAISTLYFDDSSNVI

SEQ ID NO: 4729 - protein, 43 aa, Artificial Sequence
  Cyclic GFR-binding peptide
GGGGGGGGGDENEKVVRVPSTSSTQVDLNAISVLYFDENEKVV

SEQ ID NO: 4730 - protein, 43 aa, Artificial Sequence
  Cyclic GFR-binding peptide
AAAAAAAAADAANNVVGIPEPSSVSQELSATSMLYYDAANNVV

SEQ ID NO: 4731 - protein, 43 aa, Artificial Sequence
  Cyclic GFR-binding peptide
GGGGGGGGGDDSSNVIGIPEPSSAPTRLEPISMLYLDENEKVV

SEQ ID NO: 4732 - protein, 43 aa, Artificial Sequence
  Cyclic GFR-binding peptide
GGGGGGGGGDENEKVVKIPKASSVSQQLEPISTLYLDENEKVV

SEQ ID NO: 4733 - protein, 43 aa, Artificial Sequence
  Cyclic GFR-binding peptide
GGGGGGGGGDENEKVVSTPPTSSVPTEVSPINTLYFDENEKVV

SEQ ID NO: 4734 - protein, 43 aa, Artificial Sequence
  Cyclic GFR-binding peptide
AAAAAAAAADENEKVVKIPKASSVPTKMKPLSVLYVDDSSNVI

SEQ ID NO: 4735 - protein, 43 aa, Artificial Sequence
  Cyclic GFR-binding peptide
GGGGGGGGGDDSSNVISTPPTSSVSQKMKPLSILYVDDSSNVI

SEQ ID NO: 4736 - protein, 45 aa, Artificial Sequence
  Cyclic GFR-binding peptide
GGGGGGGGGFDNDENVVRVPSTSSVPEKMEPLTMLYYFDNDENVV

SEQ ID NO: 4737 - protein, 45 aa, Artificial Sequence
  Cyclic GFR-binding peptide
GGGGGGGGGFDNDENVVSTPPTSSTPTKMSNITTQIMFDNDENVV

SEQ ID NO: 4738 - protein, 43 aa, Artificial Sequence
  Cyclic GFR-binding peptide
AAAAAAAAADENEKVVRVPSTSSVPAEESNITVQIMDDSSNVI

SEQ ID NO: 4739 - protein, 45 aa, Artificial Sequence
  Cyclic GFR-binding peptide
GGGGGGGGGFDNDENVVAASKASSVPQRLRSVKVAKVFDNDENVV

SEQ ID NO: 4740 - protein, 43 aa, Artificial Sequence
  Cyclic GFR-binding peptide
AAAAAAAAADAANNVVKIPKASSTQVRLRSVKTAKVDAANNVV

SEQ ID NO: 4741 - protein, 43 aa, Artificial Sequence
  Cyclic GFR-binding peptide
AAAAAAAAADENEKVVAASKASSVPEKMRPVQTRKIDDSSNVI

SEQ ID NO: 4742 - protein, 45 aa, Artificial Sequence
  Cyclic GFR-binding peptide
GGGGGGGGGFDNDENVVGIPEPSSAPVDMRPVQIRKIFDNDENVV

SEQ ID NO: 4743 - protein, 24 aa, Artificial Sequence
  Cyclic GFR-binding peptide
DEYDKSAISTLYLDEYDKGGGGGG

SEQ ID NO: 4744 - protein, 20 aa, Artificial Sequence
  Cyclic GFR-binding peptide
GTPGPSAISTLYLDDMGVGG

SEQ ID NO: 4745 - protein, 24 aa, Artificial Sequence
  Cyclic GFR-binding peptide
IGKTPSAISTLYLIGKTPGGGGGG

SEQ ID NO: 4746 - protein, 19 aa, Artificial Sequence
  Cyclic GFR-binding peptide
NAISVLYFDENEKGGGGGG

SEQ ID NO: 4747 - protein, 24 aa, Artificial Sequence
  Cyclic GFR-binding peptide
DSSNNSATSVLYYDSSNNGGGGGG

SEQ ID NO: 4748 - protein, 23 aa, Artificial Sequence
  Cyclic GFR-binding peptide
SAISTLYLEIVRKKPLAAAAAAA

SEQ ID NO: 4749 - protein, 16 aa, Artificial Sequence
  Cyclic GFR-binding peptide
NAISVLYFGGGGGGGG

SEQ ID NO: 4750 - protein, 19 aa, Artificial Sequence
  Cyclic GFR-binding peptide
SATSVLYYGGGLRKHRGGG

SEQ ID NO: 4751 - protein, 26 aa, Artificial Sequence
  Cyclic GFR-binding peptide
WWFWGGGSAISTLYLIGKTPGGGGGG

SEQ ID NO: 4752 - protein, 27 aa, Artificial Sequence
  Cyclic GFR-binding peptide
GTPGPGGGSAISTLYLIGKTPGGGGGG

SEQ ID NO: 4753 - protein, 27 aa, Artificial Sequence
  Cyclic GFR-binding peptide
GTPGPGGGNAISVLYFDENEKGGGGGG

SEQ ID NO: 4754 - protein, 21 aa, Artificial Sequence
  Cyclic GFR-binding peptide
GTPGPGGGSAISMLYLGGGGG

SEQ ID NO: 4755 - protein, 21 aa, Artificial Sequence
  Cyclic GFR-binding peptide
GTPGPSPISTLYKGGGGGGGG

SEQ ID NO: 4756 - protein, 26 aa, Artificial Sequence
  Cyclic GFR-binding peptide
GTPGPGGNAISMLYFVGRKPGGGGGG

SEQ ID NO: 4757 - protein, 26 aa, Artificial Sequence
  Cyclic GFR-binding peptide
GTPGPGGNAISTLYLDENEKGGGGGG

SEQ ID NO: 4758 - protein, 26 aa, Artificial Sequence
  Cyclic GFR-binding peptide
GTPGPGGSAISTLYLDDSSNGGGGGG

SEQ ID NO: 4759 - protein, 26 aa, Artificial Sequence
  Cyclic GFR-binding peptide
GTPGPGGNAISTLYLDDSSNGGGGGG

SEQ ID NO: 4760 - protein, 22 aa, Artificial Sequence
  Cyclic GFR-binding peptide
GTPGPGGSAISTLYLGGGGGGG

SEQ ID NO: 4761 - protein, 26 aa, Artificial Sequence
  Cyclic GFR-binding peptide
WWFWGGGSAISTLYLDEYDKGGGGGG

SEQ ID NO: 4762 - protein, 20 aa, Artificial Sequence
  Cyclic GFR-binding peptide
GTPGPSAISTLYLGGGGGGG

SEQ ID NO: 4763 - protein, 26 aa, Artificial Sequence
  Cyclic GFR-binding peptide
GTPGPGGSATSVLYYDDSSNGGGGGG

SEQ ID NO: 4764 - protein, 21 aa, Artificial Sequence
  Cyclic GFR-binding peptide
GTPGPGGSAISMLYLGGGGGG

SEQ ID NO: 4765 - protein, 25 aa, Artificial Sequence
  Cyclic GFR-binding peptide
VGRKPELEPLPIVYYVGRKPGGGGG

SEQ ID NO: 4766 - protein, 21 aa, Artificial Sequence
  Cyclic GFR-binding peptide
EPLPIVYYVGRTPKVGGGGGG

SEQ ID NO: 4767 - protein, 19 aa, Artificial Sequence
  Cyclic GFR-binding peptide
EPLPIVYYVGRTPGGGGGG

SEQ ID NO: 4768 - protein, 23 aa, Artificial Sequence
  Cyclic GFR-binding peptide
RSVKVAKVRIKPHQGQHGGGGGG

SEQ ID NO: 4769 - protein, 20 aa, Artificial Sequence
  Cyclic GFR-binding peptide
SNITMQIMRIKPHQGGGGGG

SEQ ID NO: 4770 - protein, 24 aa, Artificial Sequence
  Cyclic GFR-binding peptide
EYVRKRPVQVRKIEYVRKGGGGGG

SEQ ID NO: 4771 - protein, 24 aa, Artificial Sequence
  Cyclic GFR-binding peptide
DENKNSSLSILFFDENKNGGGGGG

SEQ ID NO: 4772 - protein, 24 aa, Artificial Sequence
  Cyclic GFR-binding peptide
DENEKSSLSILFFDENEKGGGGGG

SEQ ID NO: 4773 - protein, 24 aa, Artificial Sequence
  Cyclic GFR-binding peptide
DAANNSPISILYIDAANNGGGGGG

SEQ ID NO: 4774 - protein, 16 aa, Artificial Sequence
  Cyclic GFR-binding peptide
SPISILYIGGGGGGGG

SEQ ID NO: 4775 - protein, 24 aa, Artificial Sequence
  Cyclic GFR-binding peptide
DDSSNSPISLLYIDAANNGGGGGG

SEQ ID NO: 4776 - protein, 15 aa, Artificial Sequence
  Cyclic GFR-binding peptide
NAISVLYFGGGGGGG

SEQ ID NO: 4777 - protein, 21 aa, Artificial Sequence
  Cyclic GFR-binding peptide
EPLPIVYYVGRKPKVGGGGGG

SEQ ID NO: 4778 - protein, 19 aa, Artificial Sequence
  Cyclic GFR-binding peptide
EPLPIVYYDDSSNGGGGGG

SEQ ID NO: 4779 - protein, 21 aa, Artificial Sequence
  Cyclic GFR-binding peptide
EPLPIVYYDDSSNGGGGGGGG

SEQ ID NO: 4780 - protein, 19 aa, Artificial Sequence
  Cyclic GFR-binding peptide
SPISILYIDAANNGGGGGG

SEQ ID NO: 4781 - protein, 19 aa, Artificial Sequence
  Cyclic GFR-binding peptide
NAISTLYFDDSSNGGGGGG

SEQ ID NO: 4782 - protein, 23 aa, Artificial Sequence
  Cyclic GFR-binding peptide
KLSAISTLYLEIVRKKPGGGGGG

SEQ ID NO: 4783 - protein, 19 aa, Artificial Sequence
  Cyclic GFR-binding peptide
SPINMLYFNEKNQGGGGGG

SEQ ID NO: 4784 - protein, 16 aa, Artificial Sequence
  Cyclic GFR-binding peptide
SAISMLFLGGGGGGGG

SEQ ID NO: 4785 - protein, 19 aa, Artificial Sequence
  Cyclic GFR-binding peptide
SPINILFFDENKNGGGGGG

SEQ ID NO: 4786 - protein, 19 aa, Artificial Sequence
  Cyclic GFR-binding peptide
SNITMQIMIGKTPGGGGGG

SEQ ID NO: 4787 - protein, 19 aa, Artificial Sequence
  Cyclic GFR-binding peptide
SAISTLYLIGKTPKILKNY

SEQ ID NO: 4788 - protein, 24 aa, Artificial Sequence
  Cyclic GFR-binding peptide
WWFWGSAISTLYLIGKTPKILKNY

SEQ ID NO: 4789 - protein, 24 aa, Artificial Sequence
  Cyclic GFR-binding peptide
GTPGPSAISTLYLIGKTPKILKNY

SEQ ID NO: 4790 - protein, 21 aa, Artificial Sequence
  Cyclic GFR-binding peptide
EPLPIVYYVGRTPKVEQLSGG

SEQ ID NO: 4791 - protein, 24 aa, Artificial Sequence
  Cyclic GFR-binding peptide
GGGGGGKDYEDLYLTSIASKDYED

SEQ ID NO: 4792 - protein, 20 aa, Artificial Sequence
  Cyclic GFR-binding peptide
GGVGMDDLYLTSIASPGPTG

SEQ ID NO: 4793 - protein, 24 aa, Artificial Sequence
  Cyclic GFR-binding peptide
GGGGGGPTKGILYLTSIASPTKGI

SEQ ID NO: 4794 - protein, 19 aa, Artificial Sequence
  Cyclic GFR-binding peptide
GGGGGGKENEDFYLVSIAN

SEQ ID NO: 4795 - protein, 24 aa, Artificial Sequence
  Cyclic GFR-binding peptide
GGGGGGNNSSDYYLVSTASNNSSD

SEQ ID NO: 4796 - protein, 23 aa, Artificial Sequence
  Cyclic GFR-binding peptide
AAAAAAALPKKRVIELYLTSIAS

SEQ ID NO: 4797 - protein, 16 aa, Artificial Sequence
  Cyclic GFR-binding peptide
GGGGGGGGFYLVSIAN

SEQ ID NO: 4798 - protein, 19 aa, Artificial Sequence
  Cyclic GFR-binding peptide
GGGRHKRLGGGYYLVSTAS

SEQ ID NO: 4799 - protein, 26 aa, Artificial Sequence
  Cyclic GFR-binding peptide
GGGGGGPTKGILYLTSIASGGGWFWW

SEQ ID NO: 4800 - protein, 27 aa, Artificial Sequence
  Cyclic GFR-binding peptide
GGGGGGPTKGILYLTSIASGGGPGPTG

SEQ ID NO: 4801 - protein, 27 aa, Artificial Sequence
  Cyclic GFR-binding peptide
GGGGGGKENEDFYLVSIANGGGPGPTG

SEQ ID NO: 4802 - protein, 21 aa, Artificial Sequence
  Cyclic GFR-binding peptide
GGGGGLYLMSIASGGGPGPTG

SEQ ID NO: 4803 - protein, 21 aa, Artificial Sequence
  Cyclic GFR-binding peptide
GGGGGGGGKYLTSIPSPGPTG

SEQ ID NO: 4804 - protein, 26 aa, Artificial Sequence
  Cyclic GFR-binding peptide
GGGGGGPKRGVFYLMSIANGGPGPTG

SEQ ID NO: 4805 - protein, 26 aa, Artificial Sequence
  Cyclic GFR-binding peptide
GGGGGGKENEDLYLTSIANGGPGPTG

SEQ ID NO: 4806 - protein, 26 aa, Artificial Sequence
  Cyclic GFR-binding peptide
GGGGGGNSSDDLYLTSIASGGPGPTG

SEQ ID NO: 4807 - protein, 26 aa, Artificial Sequence
  Cyclic GFR-binding peptide
GGGGGGNSSDDLYLTSIANGGPGPTG

SEQ ID NO: 4808 - protein, 22 aa, Artificial Sequence
  Cyclic GFR-binding peptide
GGGGGGGLYLTSIASGGPGPTG

SEQ ID NO: 4809 - protein, 26 aa, Artificial Sequence
  Cyclic GFR-binding peptide
GGGGGGKDYEDLYLTSIASGGGWFWW

SEQ ID NO: 4810 - protein, 20 aa, Artificial Sequence
  Cyclic GFR-binding peptide
GGGGGGGLYLTSIASPGPTG

SEQ ID NO: 4811 - protein, 26 aa, Artificial Sequence
  Cyclic GFR-binding peptide
GGGGGGNSSDDYYLVSTASGGPGPTG

SEQ ID NO: 4812 - protein, 21 aa, Artificial Sequence
  Cyclic GFR-binding peptide
GGGGGGLYLMSIASGGPGPTG

SEQ ID NO: 4813 - protein, 25 aa, Artificial Sequence
  Cyclic GFR-binding peptide
GGGGGPKRGVYYVIPLPELEPKRGV

SEQ ID NO: 4814 - protein, 21 aa, Artificial Sequence
  Cyclic GFR-binding peptide
GGGGGGVKPTRGVYYVIPLPE

SEQ ID NO: 4815 - protein, 19 aa, Artificial Sequence
  Cyclic GFR-binding peptide
GGGGGGPTRGVYYVIPLPE

SEQ ID NO: 4816 - protein, 23 aa, Artificial Sequence
  Cyclic GFR-binding peptide
GGGGGGHQGQHPKIRVKAVKVSR

SEQ ID NO: 4817 - protein, 20 aa, Artificial Sequence
  Cyclic GFR-binding peptide
GGGGGGQHPKIRMIQMTINS

SEQ ID NO: 4818 - protein, 24 aa, Artificial Sequence
  Cyclic GFR-binding peptide
GGGGGGKRVYEIKRVQVPRKRVYE

SEQ ID NO: 4819 - protein, 24 aa, Artificial Sequence
  Cyclic GFR-binding peptide
GGGGGGNKNEDFFLISLSSNKNED

SEQ ID NO: 4820 - protein, 24 aa, Artificial Sequence
  Cyclic GFR-binding peptide
GGGGGGKENEDFFLISLSSKENED

SEQ ID NO: 4821 - protein, 24 aa, Artificial Sequence
  Cyclic GFR-binding peptide
GGGGGGNNAADIYLISIPSNNAAD

SEQ ID NO: 4822 - protein, 16 aa, Artificial Sequence
  Cyclic GFR-binding peptide
GGGGGGGGIYLISIPS

SEQ ID NO: 4823 - protein, 24 aa, Artificial Sequence
  Cyclic GFR-binding peptide
GGGGGGNNAADIYLLSIPSNSSDD

SEQ ID NO: 4824 - protein, 15 aa, Artificial Sequence
  Cyclic GFR-binding peptide
GGGGGGGFYLVSIAN

SEQ ID NO: 4825 - protein, 21 aa, Artificial Sequence
  Cyclic GFR-binding peptide
GGGGGGVKPKRGVYYVIPLPE

SEQ ID NO: 4826 - protein, 19 aa, Artificial Sequence
  Cyclic GFR-binding peptide
GGGGGGNSSDDYYVIPLPE

SEQ ID NO: 4827 - protein, 21 aa, Artificial Sequence
  Cyclic GFR-binding peptide
GGGGGGGGNSSDDYYVIPLPE

SEQ ID NO: 4828 - protein, 19 aa, Artificial Sequence
  Cyclic GFR-binding peptide
GGGGGGNNAADIYLISIPS

SEQ ID NO: 4829 - protein, 19 aa, Artificial Sequence
  Cyclic GFR-binding peptide
GGGGGGNSSDDFYLTSIAN

SEQ ID NO: 4830 - protein, 23 aa, Artificial Sequence
  Cyclic GFR-binding peptide
GGGGGGPKKRVIELYLTSIASLK

SEQ ID NO: 4831 - protein, 19 aa, Artificial Sequence
  Cyclic GFR-binding peptide
GGGGGGQNKENFYLMNIPS

SEQ ID NO: 4832 - protein, 16 aa, Artificial Sequence
  Cyclic GFR-binding peptide
GGGGGGGGLFLMSIAS

SEQ ID NO: 4833 - protein, 19 aa, Artificial Sequence
  Cyclic GFR-binding peptide
GGGGGGNKNEDFFLINIPS

SEQ ID NO: 4834 - protein, 19 aa, Artificial Sequence
  Cyclic GFR-binding peptide
GGGGGGPTKGIMIQMTINS

SEQ ID NO: 4835 - protein, 19 aa, Artificial Sequence
  Cyclic GFR-binding peptide
YNKLIKPTKGILYLTSIAS

SEQ ID NO: 4836 - protein, 24 aa, Artificial Sequence
  Cyclic GFR-binding peptide
YNKLIKPTKGILYLTSIASGWFWW

SEQ ID NO: 4837 - protein, 24 aa, Artificial Sequence
  Cyclic GFR-binding peptide
YNKLIKPTKGILYLTSIASPGPTG

SEQ ID NO: 4838 - protein, 21 aa, Artificial Sequence
  Cyclic GFR-binding peptide
GGSLQEVKPTRGVYYVIPLPE

SEQ ID NO: 4839 - protein, 27 aa, Artificial Sequence
  Cyclic GFR-binding peptide
WWFWGVPTKMSAISMLYLDENEKGGGG

SEQ ID NO: 4840 - protein, 29 aa, Artificial Sequence
  Cyclic GFR-binding peptide
GTPGPVPTKLSAISMLYLDENKNGGGGGG

SEQ ID NO: 4841 - protein, 28 aa, Artificial Sequence
  Cyclic GFR-binding peptide
WWFWGGVPTQLSAISMLYLDEYDKAAAA

SEQ ID NO: 4842 - protein, 30 aa, Artificial Sequence
  Cyclic GFR-binding peptide
GTPGPGVPTRLSAISMLYLDDSSNAAAAAA

SEQ ID NO: 4843 - protein, 29 aa, Artificial Sequence
  Cyclic GFR-binding peptide
WWFWGGGVPTKTSAISMLYLDDSSNGGGG

SEQ ID NO: 4844 - protein, 31 aa, Artificial Sequence
  Cyclic GFR-binding peptide
GTPGPGGVPTALSAISMLYLDDSSNGGGGGG

SEQ ID NO: 4845 - protein, 30 aa, Artificial Sequence
  Cyclic GFR-binding peptide
WWFWGGGGVPTDLSAISMLYLDSSNNAAAA

SEQ ID NO: 4846 - protein, 32 aa, Artificial Sequence
  Cyclic GFR-binding peptide
GTPGPGGGVPEKMSAISMLYLDDMGVAAAAAA

SEQ ID NO: 4847 - protein, 27 aa, Artificial Sequence
  Cyclic GFR-binding peptide
WWFWGAPTKLSAISMLYLDKGVVGGGG

SEQ ID NO: 4848 - protein, 29 aa, Artificial Sequence
  Cyclic GFR-binding peptide
GTPGPAPTQLSAISMLYLNDKQQGGGGGG

SEQ ID NO: 4849 - protein, 28 aa, Artificial Sequence
  Cyclic GFR-binding peptide
WWFWGGTPTKMSAISMLYLDAANNAAAA

SEQ ID NO: 4850 - protein, 30 aa, Artificial Sequence
  Cyclic GFR-binding peptide
GTPGPGVPARLSAISMLYLDSANNAAAAAA

SEQ ID NO: 4851 - protein, 29 aa, Artificial Sequence
  Cyclic GFR-binding peptide
WWFWGGGAPVKTSAISMLYLDDSSNGGGG

SEQ ID NO: 4852 - protein, 31 aa, Artificial Sequence
  Cyclic GFR-binding peptide
GTPGPGGVPQALSAISMLYLDNGRVGGGGGG

SEQ ID NO: 4853 - protein, 30 aa, Artificial Sequence
  Cyclic GFR-binding peptide
WWFWGGGGVSQDLSAISMLYLVGRKPAAAA

SEQ ID NO: 4854 - protein, 32 aa, Artificial Sequence
  Cyclic GFR-binding peptide
GTPGPGGGVPQDLSAISMLYLIGKTPAAAAAA

SEQ ID NO: 4855 - protein, 27 aa, Artificial Sequence
  Cyclic GFR-binding peptide
WWFWGSRVHHSAISMLYLVGRTPGGGG

SEQ ID NO: 4856 - protein, 29 aa, Artificial Sequence
  Cyclic GFR-binding peptide
GTPGPTQVQLSAISMLYLRIKPHGGGGGG

SEQ ID NO: 4857 - protein, 28 aa, Artificial Sequence
  Cyclic GFR-binding peptide
WWFWGGVPEELSSLSILFFRIKPHAAAA

SEQ ID NO: 4858 - protein, 30 aa, Artificial Sequence
  Cyclic GFR-binding peptide
GTPGPGVPEKLSSLSILFFRIKPHAAAAAA

SEQ ID NO: 4859 - protein, 29 aa, Artificial Sequence
  Cyclic GFR-binding peptide
WWFWGGGVPEQLSSLSILFFRIKPHGGGG

SEQ ID NO: 4860 - protein, 31 aa, Artificial Sequence
  Cyclic GFR-binding peptide
GTPGPGGVPEKMSSLSILFFEYVRKGGGGGG

SEQ ID NO: 4861 - protein, 30 aa, Artificial Sequence
  Cyclic GFR-binding peptide
WWFWGGGGVPERLSSLSILFFEIVRKAAAA

SEQ ID NO: 4862 - protein, 30 aa, Artificial Sequence
  Cyclic GFR-binding peptide
GTPGPGGGVPEKTSSLSILFFDENEKGGGG

SEQ ID NO: 4863 - protein, 29 aa, Artificial Sequence
  Cyclic GFR-binding peptide
WWFWGVPEALSSLSILFFDENKNGGGGGG

SEQ ID NO: 4864 - protein, 27 aa, Artificial Sequence
  Cyclic GFR-binding peptide
GTPGPVPEDLSSLSILFFDEYDKAAAA

SEQ ID NO: 4865 - protein, 30 aa, Artificial Sequence
  Cyclic GFR-binding peptide
WWFWGGVPTELSSLSILFFDDSSNAAAAAA

SEQ ID NO: 4866 - protein, 28 aa, Artificial Sequence
  Cyclic GFR-binding peptide
GTPGPGAPTKLSSLSILFFDDSSNGGGG

SEQ ID NO: 4867 - protein, 31 aa, Artificial Sequence
  Cyclic GFR-binding peptide
WWFWGGGAPTQLSSLSILFFDDSSNGGGGGG

SEQ ID NO: 4868 - protein, 29 aa, Artificial Sequence
  Cyclic GFR-binding peptide
GTPGPGGVPTKLSSLSILFFDSSNNAAAA

SEQ ID NO: 4869 - protein, 32 aa, Artificial Sequence
  Cyclic GFR-binding peptide
WWFWGGGGTPTKMSSLSILFFDDMGVAAAAAA

SEQ ID NO: 4870 - protein, 30 aa, Artificial Sequence
  Cyclic GFR-binding peptide
GTPGPGGGVPARLSSLSILFFDKGVVGGGG

SEQ ID NO: 4871 - protein, 29 aa, Artificial Sequence
  Cyclic GFR-binding peptide
WWFWGVPTRLSSLSILFFNDKQQGGGGGG

SEQ ID NO: 4872 - protein, 27 aa, Artificial Sequence
  Cyclic GFR-binding peptide
GTPGPAPVKTSSLSILFFDAANNAAAA

SEQ ID NO: 4873 - protein, 30 aa, Artificial Sequence
  Cyclic GFR-binding peptide
WWFWGGVPQALSSLSILFFDSANNAAAAAA

SEQ ID NO: 4874 - protein, 28 aa, Artificial Sequence
  Cyclic GFR-binding peptide
GTPGPGVSQDLSSLSILFFDDSSNGGGG

SEQ ID NO: 4875 - protein, 31 aa, Artificial Sequence
  Cyclic GFR-binding peptide
WWFWGGGVPQDLSSLSILFFDNGRVGGGGGG

SEQ ID NO: 4876 - protein, 29 aa, Artificial Sequence
  Cyclic GFR-binding peptide
GTPGPGGVPTEESSLSILFFVGRKPAAAA

SEQ ID NO: 4877 - protein, 32 aa, Artificial Sequence
  Cyclic GFR-binding peptide
WWFWGGGGVPTGQSSLSILFFIGKTPAAAAAA

SEQ ID NO: 4878 - protein, 30 aa, Artificial Sequence
  Cyclic GFR-binding peptide
GTPGPGGGSRVHHSSLSILFFVGRTPGGGG

SEQ ID NO: 4879 - protein, 29 aa, Artificial Sequence
  Cyclic GFR-binding peptide
WWFWGTQVQLSSLSILFFRIKPHGGGGGG

SEQ ID NO: 4880 - protein, 27 aa, Artificial Sequence
  Cyclic GFR-binding peptide
GTPGPAPTELNAISVLYFRIKPHAAAA

SEQ ID NO: 4881 - protein, 30 aa, Artificial Sequence
  Cyclic GFR-binding peptide
WWFWGGAPTKMNAISVLYFRIKPHAAAAAA

SEQ ID NO: 4882 - protein, 28 aa, Artificial Sequence
  Cyclic GFR-binding peptide
GTPGPGAPTKLNAISVLYFRIKPHGGGG

SEQ ID NO: 4883 - protein, 31 aa, Artificial Sequence
  Cyclic GFR-binding peptide
WWFWGGGAPTRLNAISVLYFEYVRKGGGGGG

SEQ ID NO: 4884 - protein, 29 aa, Artificial Sequence
  Cyclic GFR-binding peptide
GTPGPGGAPTKTNAISVLYFEIVRKAAAA

SEQ ID NO: 4885 - protein, 30 aa, Artificial Sequence
  Cyclic GFR-binding peptide
WWFWGGGGAPTALNAISVLYFDENEKGGGG

SEQ ID NO: 4886 - protein, 32 aa, Artificial Sequence
  Cyclic GFR-binding peptide
GTPGPGGGAPTDLNAISVLYFDENKNGGGGGG

SEQ ID NO: 4887 - protein, 27 aa, Artificial Sequence
  Cyclic GFR-binding peptide
WWFWGVPTELNAISVLYFDEYDKAAAA

SEQ ID NO: 4888 - protein, 29 aa, Artificial Sequence
  Cyclic GFR-binding peptide
GTPGPVPEKMNAISVLYFDDSSNAAAAAA

SEQ ID NO: 4889 - protein, 28 aa, Artificial Sequence
  Cyclic GFR-binding peptide
WWFWGGVPTKLNAISVLYFDDSSNGGGG

SEQ ID NO: 4890 - protein, 30 aa, Artificial Sequence
  Cyclic GFR-binding peptide
GTPGPGTPTKMNAISVLYFDDSSNGGGGGG

SEQ ID NO: 4891 - protein, 29 aa, Artificial Sequence
  Cyclic GFR-binding peptide
WWFWGGGVPARLNAISVLYFDSSNNAAAA

SEQ ID NO: 4892 - protein, 31 aa, Artificial Sequence
  Cyclic GFR-binding peptide
GTPGPGGVPTRLNAISVLYFDDMGVAAAAAA

SEQ ID NO: 4893 - protein, 30 aa, Artificial Sequence
  Cyclic GFR-binding peptide
WWFWGGGGAPVKTNAISVLYFDKGVVGGGG

SEQ ID NO: 4894 - protein, 32 aa, Artificial Sequence
  Cyclic GFR-binding peptide
GTPGPGGGVPQALNAISVLYFNDKQQGGGGGG

SEQ ID NO: 4895 - protein, 27 aa, Artificial Sequence
  Cyclic GFR-binding peptide
WWFWGVSQDLNAISVLYFDAANNAAAA

SEQ ID NO: 4896 - protein, 29 aa, Artificial Sequence
  Cyclic GFR-binding peptide
GTPGPVPQDLNAISVLYFDSANNAAAAAA

SEQ ID NO: 4897 - protein, 28 aa, Artificial Sequence
  Cyclic GFR-binding peptide
WWFWGGVPTEENAISVLYFDDSSNGGGG

SEQ ID NO: 4898 - protein, 30 aa, Artificial Sequence
  Cyclic GFR-binding peptide
GTPGPGVPTGQNAISVLYFDNGRVGGGGGG

SEQ ID NO: 4899 - protein, 29 aa, Artificial Sequence
  Cyclic GFR-binding peptide
WWFWGGGSRVHHNAISVLYFVGRKPAAAA

SEQ ID NO: 4900 - protein, 31 aa, Artificial Sequence
  Cyclic GFR-binding peptide
GTPGPGGTQVQLNAISVLYFIGKTPAAAAAA

SEQ ID NO: 4901 - protein, 30 aa, Artificial Sequence
  Cyclic GFR-binding peptide
WWFWGGGGAPTELSATSVLYYVGRTPGGGG

SEQ ID NO: 4902 - protein, 32 aa, Artificial Sequence
  Cyclic GFR-binding peptide
GTPGPGGGAPTKMSATSVLYYRIKPHGGGGGG

SEQ ID NO: 4903 - protein, 27 aa, Artificial Sequence
  Cyclic GFR-binding peptide
WWFWGAPTKLSATSVLYYRIKPHAAAA

SEQ ID NO: 4904 - protein, 29 aa, Artificial Sequence
  Cyclic GFR-binding peptide
GTPGPAPTQLSATSVLYYRIKPHAAAAAA

SEQ ID NO: 4905 - protein, 28 aa, Artificial Sequence
  Cyclic GFR-binding peptide
WWFWGGAPTRLSATSVLYYRIKPHGGGG

SEQ ID NO: 4906 - protein, 30 aa, Artificial Sequence
  Cyclic GFR-binding peptide
GTPGPGAPTKTSATSVLYYEYVRKGGGGGG

SEQ ID NO: 4907 - protein, 29 aa, Artificial Sequence
  Cyclic GFR-binding peptide
WWFWGGGAPTALSATSVLYYEIVRKAAAA

SEQ ID NO: 4908 - protein, 29 aa, Artificial Sequence
  Cyclic GFR-binding peptide
GTPGPGGAPTDLSATSVLYYDENEKGGGG

SEQ ID NO: 4909 - protein, 32 aa, Artificial Sequence
  Cyclic GFR-binding peptide
WWFWGGGGVPTELSATSVLYYDENKNGGGGGG

SEQ ID NO: 4910 - protein, 30 aa, Artificial Sequence
  Cyclic GFR-binding peptide
GTPGPGGGVPEKMSATSVLYYDEYDKAAAA

SEQ ID NO: 4911 - protein, 29 aa, Artificial Sequence
  Cyclic GFR-binding peptide
WWFWGVPTKLSATSVLYYDDSSNAAAAAA

SEQ ID NO: 4912 - protein, 27 aa, Artificial Sequence
  Cyclic GFR-binding peptide
GTPGPTPTKMSATSVLYYDDSSNGGGG

SEQ ID NO: 4913 - protein, 30 aa, Artificial Sequence
  Cyclic GFR-binding peptide
WWFWGGVPARLSATSVLYYDDSSNGGGGGG

SEQ ID NO: 4914 - protein, 28 aa, Artificial Sequence
  Cyclic GFR-binding peptide
GTPGPGVPTRLSATSVLYYDSSNNAAAA

SEQ ID NO: 4915 - protein, 31 aa, Artificial Sequence
  Cyclic GFR-binding peptide
WWFWGGGAPVKTSATSVLYYDDMGVAAAAAA

SEQ ID NO: 4916 - protein, 29 aa, Artificial Sequence
  Cyclic GFR-binding peptide
GTPGPGGVPQALSATSVLYYDKGVVGGGG

SEQ ID NO: 4917 - protein, 32 aa, Artificial Sequence
  Cyclic GFR-binding peptide
WWFWGGGGVSQDLSATSVLYYNDKQQGGGGGG

SEQ ID NO: 4918 - protein, 30 aa, Artificial Sequence
  Cyclic GFR-binding peptide
GTPGPGGGVPQDLSATSVLYYDAANNAAAA

SEQ ID NO: 4919 - protein, 29 aa, Artificial Sequence
  Cyclic GFR-binding peptide
WWFWGVPTEESATSVLYYDSANNAAAAAA

SEQ ID NO: 4920 - protein, 27 aa, Artificial Sequence
  Cyclic GFR-binding peptide
GTPGPVPTGQSATSVLYYDDSSNGGGG

SEQ ID NO: 4921 - protein, 30 aa, Artificial Sequence
  Cyclic GFR-binding peptide
WWFWGGSRVHHSATSVLYYDNGRVGGGGGG

SEQ ID NO: 4922 - protein, 28 aa, Artificial Sequence
  Cyclic GFR-binding peptide
GTPGPGTQVQLSATSVLYYVGRKPAAAA

SEQ ID NO: 4923 - protein, 31 aa, Artificial Sequence
  Cyclic GFR-binding peptide
WWFWGGGVPTELSPISVLYKIGKTPAAAAAA

SEQ ID NO: 4924 - protein, 29 aa, Artificial Sequence
  Cyclic GFR-binding peptide
GTPGPGGVPTKMSPISVLYKVGRTPGGGG

SEQ ID NO: 4925 - protein, 32 aa, Artificial Sequence
  Cyclic GFR-binding peptide
WWFWGGGGVPTKLSPISVLYKRIKPHGGGGGG

SEQ ID NO: 4926 - protein, 30 aa, Artificial Sequence
  Cyclic GFR-binding peptide
GTPGPGGGVPTQLSPISVLYKRIKPHAAAA

SEQ ID NO: 4927 - protein, 29 aa, Artificial Sequence
  Cyclic GFR-binding peptide
WWFWGVPTRLSPISVLYKRIKPHAAAAAA

SEQ ID NO: 4928 - protein, 27 aa, Artificial Sequence
  Cyclic GFR-binding peptide
GTPGPVPTKTSPISVLYKRIKPHGGGG

SEQ ID NO: 4929 - protein, 30 aa, Artificial Sequence
  Cyclic GFR-binding peptide
WWFWGGVPTALSPISVLYKEYVRKGGGGGG

SEQ ID NO: 4930 - protein, 28 aa, Artificial Sequence
  Cyclic GFR-binding peptide
GTPGPGVPTDLSPISVLYKEIVRKAAAA

SEQ ID NO: 4931 - protein, 29 aa, Artificial Sequence
  Cyclic GFR-binding peptide
WWFWGGGVPEKMSPISVLYKDENEKGGGG

SEQ ID NO: 4932 - protein, 31 aa, Artificial Sequence
  Cyclic GFR-binding peptide
GTPGPGGAPTKLSPISVLYKDENKNGGGGGG

SEQ ID NO: 4933 - protein, 30 aa, Artificial Sequence
  Cyclic GFR-binding peptide
WWFWGGGGAPTQLSPISVLYKDEYDKAAAA

SEQ ID NO: 4934 - protein, 32 aa, Artificial Sequence
  Cyclic GFR-binding peptide
GTPGPGGGTPTKMSPISVLYKDDSSNAAAAAA

SEQ ID NO: 4935 - protein, 27 aa, Artificial Sequence
  Cyclic GFR-binding peptide
WWFWGVPARLSPISVLYKDDSSNGGGG

SEQ ID NO: 4936 - protein, 29 aa, Artificial Sequence
  Cyclic GFR-binding peptide
GTPGPAPVKTSPISVLYKDDSSNGGGGGG

SEQ ID NO: 4937 - protein, 28 aa, Artificial Sequence
  Cyclic GFR-binding peptide
WWFWGGVPQALSPISVLYKDSSNNAAAA

SEQ ID NO: 4938 - protein, 30 aa, Artificial Sequence
  Cyclic GFR-binding peptide
GTPGPGVSQDLSPISVLYKDDMGVAAAAAA

SEQ ID NO: 4939 - protein, 29 aa, Artificial Sequence
  Cyclic GFR-binding peptide
WWFWGGGVPQDLSPISVLYKDKGVVGGGG

SEQ ID NO: 4940 - protein, 31 aa, Artificial Sequence
  Cyclic GFR-binding peptide
GTPGPGGSRVHHSPISVLYKNDKQQGGGGGG

SEQ ID NO: 4941 - protein, 30 aa, Artificial Sequence
  Cyclic GFR-binding peptide
WWFWGGGGTQVQLSPISVLYKDAANNAAAA

SEQ ID NO: 4942 - protein, 32 aa, Artificial Sequence
  Cyclic GFR-binding peptide
GTPGPGGGVPTELEPISILYLDSANNAAAAAA

SEQ ID NO: 4943 - protein, 27 aa, Artificial Sequence
  Cyclic GFR-binding peptide
WWFWGVPTKMEPISILYLDDSSNGGGG

SEQ ID NO: 4944 - protein, 29 aa, Artificial Sequence
  Cyclic GFR-binding peptide
GTPGPVPTKLEPISILYLDNGRVGGGGGG

SEQ ID NO: 4945 - protein, 28 aa, Artificial Sequence
  Cyclic GFR-binding peptide
WWFWGGVPTQLEPISILYLVGRKPAAAA

SEQ ID NO: 4946 - protein, 30 aa, Artificial Sequence
  Cyclic GFR-binding peptide
GTPGPGVPTRLEPISILYLIGKTPAAAAAA

SEQ ID NO: 4947 - protein, 29 aa, Artificial Sequence
  Cyclic GFR-binding peptide
WWFWGGGVPTKTEPISILYLVGRTPGGGG

SEQ ID NO: 4948 - protein, 31 aa, Artificial Sequence
  Cyclic GFR-binding peptide
GTPGPGGVPTALEPISILYLRIKPHGGGGGG

SEQ ID NO: 4949 - protein, 30 aa, Artificial Sequence
  Cyclic GFR-binding peptide
WWFWGGGGVPTDLEPISILYLRIKPHAAAA

SEQ ID NO: 4950 - protein, 32 aa, Artificial Sequence
  Cyclic GFR-binding peptide
GTPGPGGGVPEKMEPISILYLRIKPHAAAAAA

SEQ ID NO: 4951 - protein, 27 aa, Artificial Sequence
  Cyclic GFR-binding peptide
WWFWGAPTKLEPISILYLRIKPHGGGG

SEQ ID NO: 4952 - protein, 29 aa, Artificial Sequence
  Cyclic GFR-binding peptide
GTPGPAPTQLEPISILYLEYVRKGGGGGG

SEQ ID NO: 4953 - protein, 28 aa, Artificial Sequence
  Cyclic GFR-binding peptide
WWFWGGTPTKMEPISILYLEIVRKAAAA

SEQ ID NO: 4954 - protein, 28 aa, Artificial Sequence
  Cyclic GFR-binding peptide
GTPGPGVPARLEPISILYLDENEKGGGG

SEQ ID NO: 4955 - protein, 31 aa, Artificial Sequence
  Cyclic GFR-binding peptide
WWFWGGGAPVKTEPISILYLDENKNGGGGGG

SEQ ID NO: 4956 - protein, 29 aa, Artificial Sequence
  Cyclic GFR-binding peptide
GTPGPGGVPQALEPISILYLDEYDKAAAA

SEQ ID NO: 4957 - protein, 32 aa, Artificial Sequence
  Cyclic GFR-binding peptide
WWFWGGGGVSQDLEPISILYLDDSSNAAAAAA

SEQ ID NO: 4958 - protein, 30 aa, Artificial Sequence
  Cyclic GFR-binding peptide
GTPGPGGGVPQDLEPISILYLDDSSNGGGG

SEQ ID NO: 4959 - protein, 29 aa, Artificial Sequence
  Cyclic GFR-binding peptide
WWFWGSRVHHEPISILYLDDSSNGGGGGG

SEQ ID NO: 4960 - protein, 27 aa, Artificial Sequence
  Cyclic GFR-binding peptide
GTPGPTQVQLEPISILYLDSSNNAAAA

SEQ ID NO: 4961 - protein, 30 aa, Artificial Sequence
  Cyclic GFR-binding peptide
WWFWGGTPTELSPINMLYFDDMGVAAAAAA

SEQ ID NO: 4962 - protein, 28 aa, Artificial Sequence
  Cyclic GFR-binding peptide
GTPGPGTPTKMSPINMLYFDKGVVGGGG

SEQ ID NO: 4963 - protein, 31 aa, Artificial Sequence
  Cyclic GFR-binding peptide
WWFWGGGTPTKLSPINMLYFNDKQQGGGGGG

SEQ ID NO: 4964 - protein, 29 aa, Artificial Sequence
  Cyclic GFR-binding peptide
GTPGPGGTPTQLSPINMLYFDAANNAAAA

SEQ ID NO: 4965 - protein, 32 aa, Artificial Sequence
  Cyclic GFR-binding peptide
WWFWGGGGTPTRLSPINMLYFDSANNAAAAAA

SEQ ID NO: 4966 - protein, 30 aa, Artificial Sequence
  Cyclic GFR-binding peptide
GTPGPGGGTPTKTSPINMLYFDDSSNGGGG

SEQ ID NO: 4967 - protein, 29 aa, Artificial Sequence
  Cyclic GFR-binding peptide
WWFWGTPTALSPINMLYFDNGRVGGGGGG

SEQ ID NO: 4968 - protein, 27 aa, Artificial Sequence
  Cyclic GFR-binding peptide
GTPGPTPTDLSPINMLYFVGRKPAAAA

SEQ ID NO: 4969 - protein, 30 aa, Artificial Sequence
  Cyclic GFR-binding peptide
WWFWGGVPTELSPINMLYFIGKTPAAAAAA

SEQ ID NO: 4970 - protein, 28 aa, Artificial Sequence
  Cyclic GFR-binding peptide
GTPGPGVPEKMSPINMLYFVGRTPGGGG

SEQ ID NO: 4971 - protein, 31 aa, Artificial Sequence
  Cyclic GFR-binding peptide
WWFWGGGAPTKLSPINMLYFRIKPHGGGGGG

SEQ ID NO: 4972 - protein, 29 aa, Artificial Sequence
  Cyclic GFR-binding peptide
GTPGPGGAPTQLSPINMLYFRIKPHAAAA

SEQ ID NO: 4973 - protein, 32 aa, Artificial Sequence
  Cyclic GFR-binding peptide
WWFWGGGGVPTKLSPINMLYFRIKPHAAAAAA

SEQ ID NO: 4974 - protein, 30 aa, Artificial Sequence
  Cyclic GFR-binding peptide
GTPGPGGGVPARLSPINMLYFRIKPHGGGG

SEQ ID NO: 4975 - protein, 29 aa, Artificial Sequence
  Cyclic GFR-binding peptide
WWFWGVPTRLSPINMLYFEYVRKGGGGGG

SEQ ID NO: 4976 - protein, 27 aa, Artificial Sequence
  Cyclic GFR-binding peptide
GTPGPAPVKTSPINMLYFEIVRKAAAA

SEQ ID NO: 4977 - protein, 28 aa, Artificial Sequence
  Cyclic GFR-binding peptide
WWFWGGVPQALSPINMLYFDENEKGGGG

SEQ ID NO: 4978 - protein, 30 aa, Artificial Sequence
  Cyclic GFR-binding peptide
GTPGPGVSQDLSPINMLYFDENKNGGGGGG

SEQ ID NO: 4979 - protein, 29 aa, Artificial Sequence
  Cyclic GFR-binding peptide
WWFWGGGVPQDLSPINMLYFDEYDKAAAA

SEQ ID NO: 4980 - protein, 31 aa, Artificial Sequence
  Cyclic GFR-binding peptide
GTPGPGGVPTEESPINMLYFDDSSNAAAAAA

SEQ ID NO: 4981 - protein, 30 aa, Artificial Sequence
  Cyclic GFR-binding peptide
WWFWGGGGVPTGQSPINMLYFDDSSNGGGG

SEQ ID NO: 4982 - protein, 32 aa, Artificial Sequence
  Cyclic GFR-binding peptide
GTPGPGGGSRVHHSPINMLYFDDSSNGGGGGG

SEQ ID NO: 4983 - protein, 27 aa, Artificial Sequence
  Cyclic GFR-binding peptide
WWFWGTQVQLSPINMLYFDSSNNAAAA

SEQ ID NO: 4984 - protein, 29 aa, Artificial Sequence
  Cyclic GFR-binding peptide
GTPGPVPAELSPISILYIDDMGVAAAAAA

SEQ ID NO: 4985 - protein, 28 aa, Artificial Sequence
  Cyclic GFR-binding peptide
WWFWGGVPAKMSPISILYIDKGVVGGGG

SEQ ID NO: 4986 - protein, 30 aa, Artificial Sequence
  Cyclic GFR-binding peptide
GTPGPGVPAKLSPISILYINDKQQGGGGGG

SEQ ID NO: 4987 - protein, 29 aa, Artificial Sequence
  Cyclic GFR-binding peptide
WWFWGGGVPAQLSPISILYIDAANNAAAA

SEQ ID NO: 4988 - protein, 31 aa, Artificial Sequence
  Cyclic GFR-binding peptide
GTPGPGGVPARLSPISILYIDSANNAAAAAA

SEQ ID NO: 4989 - protein, 30 aa, Artificial Sequence
  Cyclic GFR-binding peptide
WWFWGGGGVPAKTSPISILYIDDSSNGGGG

SEQ ID NO: 4990 - protein, 32 aa, Artificial Sequence
  Cyclic GFR-binding peptide
GTPGPGGGVPAALSPISILYIDNGRVGGGGGG

SEQ ID NO: 4991 - protein, 27 aa, Artificial Sequence
  Cyclic GFR-binding peptide
WWFWGVPADLSPISILYIVGRKPAAAA

SEQ ID NO: 4992 - protein, 29 aa, Artificial Sequence
  Cyclic GFR-binding peptide
GTPGPVPTELSPISILYIIGKTPAAAAAA

SEQ ID NO: 4993 - protein, 28 aa, Artificial Sequence
  Cyclic GFR-binding peptide
WWFWGGVPEKMSPISILYIVGRTPGGGG

SEQ ID NO: 4994 - protein, 30 aa, Artificial Sequence
  Cyclic GFR-binding peptide
GTPGPGAPTKLSPISILYIRIKPHGGGGGG

SEQ ID NO: 4995 - protein, 29 aa, Artificial Sequence
  Cyclic GFR-binding peptide
WWFWGGGAPTQLSPISILYIRIKPHAAAA

SEQ ID NO: 4996 - protein, 31 aa, Artificial Sequence
  Cyclic GFR-binding peptide
GTPGPGGVPTKLSPISILYIRIKPHAAAAAA

SEQ ID NO: 4997 - protein, 30 aa, Artificial Sequence
  Cyclic GFR-binding peptide
WWFWGGGGTPTKMSPISILYIRIKPHGGGG

SEQ ID NO: 4998 - protein, 32 aa, Artificial Sequence
  Cyclic GFR-binding peptide
GTPGPGGGVPTRLSPISILYIEYVRKGGGGGG

SEQ ID NO: 4999 - protein, 27 aa, Artificial Sequence
  Cyclic GFR-binding peptide
WWFWGAPVKTSPISILYIEIVRKAAAA

SEQ ID NO: 5000 - protein, 27 aa, Artificial Sequence
  Cyclic GFR-binding peptide
GTPGPVPQALSPISILYIDENEKGGGG

SEQ ID NO: 5001 - protein, 30 aa, Artificial Sequence
  Cyclic GFR-binding peptide
WWFWGGVSQDLSPISILYIDENKNGGGGGG

SEQ ID NO: 5002 - protein, 28 aa, Artificial Sequence
  Cyclic GFR-binding peptide
GTPGPGVPQDLSPISILYIDEYDKAAAA

SEQ ID NO: 5003 - protein, 31 aa, Artificial Sequence
  Cyclic GFR-binding peptide
WWFWGGGVPTEESPISILYIDDSSNAAAAAA

SEQ ID NO: 5004 - protein, 29 aa, Artificial Sequence
  Cyclic GFR-binding peptide
GTPGPGGVPTGQSPISILYIDDSSNGGGG

SEQ ID NO: 5005 - protein, 32 aa, Artificial Sequence
  Cyclic GFR-binding peptide
WWFWGGGGSRVHHSPISILYIDDSSNGGGGGG

SEQ ID NO: 5006 - protein, 30 aa, Artificial Sequence
  Cyclic GFR-binding peptide
GTPGPGGGTQVQLSPISILYIDSSNNAAAA

SEQ ID NO: 5007 - protein, 29 aa, Artificial Sequence
  Cyclic GFR-binding peptide
WWFWGVPTELSPISILFIDDMGVAAAAAA

SEQ ID NO: 5008 - protein, 27 aa, Artificial Sequence
  Cyclic GFR-binding peptide
GTPGPVPTKMSPISILFIDKGVVGGGG

SEQ ID NO: 5009 - protein, 30 aa, Artificial Sequence
  Cyclic GFR-binding peptide
WWFWGGVPTKLSPISILFINDKQQGGGGGG

SEQ ID NO: 5010 - protein, 28 aa, Artificial Sequence
  Cyclic GFR-binding peptide
GTPGPGVPTQLSPISILFIDAANNAAAA

SEQ ID NO: 5011 - protein, 31 aa, Artificial Sequence
  Cyclic GFR-binding peptide
WWFWGGGVPTRLSPISILFIDSANNAAAAAA

SEQ ID NO: 5012 - protein, 29 aa, Artificial Sequence
  Cyclic GFR-binding peptide
GTPGPGGVPTKTSPISILFIDDSSNGGGG

SEQ ID NO: 5013 - protein, 32 aa, Artificial Sequence
  Cyclic GFR-binding peptide
WWFWGGGGVPTALSPISILFIDNGRVGGGGGG

SEQ ID NO: 5014 - protein, 30 aa, Artificial Sequence
  Cyclic GFR-binding peptide
GTPGPGGGVPTDLSPISILFIVGRKPAAAA

SEQ ID NO: 5015 - protein, 29 aa, Artificial Sequence
  Cyclic GFR-binding peptide
WWFWGVPEKMSPISILFIIGKTPAAAAAA

SEQ ID NO: 5016 - protein, 27 aa, Artificial Sequence
  Cyclic GFR-binding peptide
GTPGPAPTKLSPISILFIVGRTPGGGG

SEQ ID NO: 5017 - protein, 30 aa, Artificial Sequence
  Cyclic GFR-binding peptide
WWFWGGAPTQLSPISILFIRIKPHGGGGGG

SEQ ID NO: 5018 - protein, 28 aa, Artificial Sequence
  Cyclic GFR-binding peptide
GTPGPGTPTKMSPISILFIRIKPHAAAA

SEQ ID NO: 5019 - protein, 31 aa, Artificial Sequence
  Cyclic GFR-binding peptide
WWFWGGGVPARLSPISILFIRIKPHAAAAAA

SEQ ID NO: 5020 - protein, 29 aa, Artificial Sequence
  Cyclic GFR-binding peptide
GTPGPGGAPVKTSPISILFIRIKPHGGGG

SEQ ID NO: 5021 - protein, 32 aa, Artificial Sequence
  Cyclic GFR-binding peptide
WWFWGGGGVPQALSPISILFIEYVRKGGGGGG

SEQ ID NO: 5022 - protein, 30 aa, Artificial Sequence
  Cyclic GFR-binding peptide
GTPGPGGGVSQDLSPISILFIEIVRKAAAA

SEQ ID NO: 5023 - protein, 27 aa, Artificial Sequence
  Cyclic GFR-binding peptide
WWFWGVPQDLSPISILFIDENEKGGGG

SEQ ID NO: 5024 - protein, 29 aa, Artificial Sequence
  Cyclic GFR-binding peptide
GTPGPSRVHHSPISILFIDENKNGGGGGG

SEQ ID NO: 5025 - protein, 28 aa, Artificial Sequence
  Cyclic GFR-binding peptide
WWFWGGTQVQLSPISILFIDEYDKAAAA

SEQ ID NO: 5026 - protein, 30 aa, Artificial Sequence
  Cyclic GFR-binding peptide
GTPGPGAPVELKPLSMLYVDDSSNAAAAAA

SEQ ID NO: 5027 - protein, 29 aa, Artificial Sequence
  Cyclic GFR-binding peptide
WWFWGGGAPVKMKPLSMLYVDDSSNGGGG

SEQ ID NO: 5028 - protein, 31 aa, Artificial Sequence
  Cyclic GFR-binding peptide
GTPGPGGAPVKLKPLSMLYVDDSSNGGGGGG

SEQ ID NO: 5029 - protein, 30 aa, Artificial Sequence
  Cyclic GFR-binding peptide
WWFWGGGGAPVQLKPLSMLYVDSSNNAAAA

SEQ ID NO: 5030 - protein, 32 aa, Artificial Sequence
  Cyclic GFR-binding peptide
GTPGPGGGAPVRLKPLSMLYVDDMGVAAAAAA

SEQ ID NO: 5031 - protein, 27 aa, Artificial Sequence
  Cyclic GFR-binding peptide
WWFWGAPVALKPLSMLYVDKGVVGGGG

SEQ ID NO: 5032 - protein, 29 aa, Artificial Sequence
  Cyclic GFR-binding peptide
GTPGPAPVDLKPLSMLYVNDKQQGGGGGG

SEQ ID NO: 5033 - protein, 28 aa, Artificial Sequence
  Cyclic GFR-binding peptide
WWFWGGVPTELKPLSMLYVDAANNAAAA

SEQ ID NO: 5034 - protein, 30 aa, Artificial Sequence
  Cyclic GFR-binding peptide
GTPGPGVPEKMKPLSMLYVDSANNAAAAAA

SEQ ID NO: 5035 - protein, 29 aa, Artificial Sequence
  Cyclic GFR-binding peptide
WWFWGGGAPTKLKPLSMLYVDDSSNGGGG

SEQ ID NO: 5036 - protein, 31 aa, Artificial Sequence
  Cyclic GFR-binding peptide
GTPGPGGAPTQLKPLSMLYVDNGRVGGGGGG

SEQ ID NO: 5037 - protein, 30 aa, Artificial Sequence
  Cyclic GFR-binding peptide
WWFWGGGGVPTKLKPLSMLYVVGRKPAAAA

SEQ ID NO: 5038 - protein, 32 aa, Artificial Sequence
  Cyclic GFR-binding peptide
GTPGPGGGTPTKMKPLSMLYVIGKTPAAAAAA

SEQ ID NO: 5039 - protein, 27 aa, Artificial Sequence
  Cyclic GFR-binding peptide
WWFWGVPARLKPLSMLYVVGRTPGGGG

SEQ ID NO: 5040 - protein, 29 aa, Artificial Sequence
  Cyclic GFR-binding peptide
GTPGPVPTRLKPLSMLYVRIKPHGGGGGG

SEQ ID NO: 5041 - protein, 28 aa, Artificial Sequence
  Cyclic GFR-binding peptide
WWFWGGVPQALKPLSMLYVRIKPHAAAA

SEQ ID NO: 5042 - protein, 30 aa, Artificial Sequence
  Cyclic GFR-binding peptide
GTPGPGVSQDLKPLSMLYVRIKPHAAAAAA

SEQ ID NO: 5043 - protein, 29 aa, Artificial Sequence
  Cyclic GFR-binding peptide
WWFWGGGVPQDLKPLSMLYVRIKPHGGGG

SEQ ID NO: 5044 - protein, 31 aa, Artificial Sequence
  Cyclic GFR-binding peptide
GTPGPGGVPTEEKPLSMLYVEYVRKGGGGGG

SEQ ID NO: 5045 - protein, 30 aa, Artificial Sequence
  Cyclic GFR-binding peptide
WWFWGGGGVPTGQKPLSMLYVEIVRKAAAA

SEQ ID NO: 5046 - protein, 30 aa, Artificial Sequence
  Cyclic GFR-binding peptide
GTPGPGGGSRVHHKPLSMLYVDENEKGGGG

SEQ ID NO: 5047 - protein, 29 aa, Artificial Sequence
  Cyclic GFR-binding peptide
WWFWGTQVQLKPLSMLYVDENKNGGGGGG

SEQ ID NO: 5048 - protein, 27 aa, Artificial Sequence
  Cyclic GFR-binding peptide
GTPGPVPQELEPLPIVYYDEYDKAAAA

SEQ ID NO: 5049 - protein, 30 aa, Artificial Sequence
  Cyclic GFR-binding peptide
WWFWGGVPQKMEPLPIVYYDDSSNAAAAAA

SEQ ID NO: 5050 - protein, 28 aa, Artificial Sequence
  Cyclic GFR-binding peptide
GTPGPGVPQKLEPLPIVYYDDSSNGGGG

SEQ ID NO: 5051 - protein, 31 aa, Artificial Sequence
  Cyclic GFR-binding peptide
WWFWGGGVPQQLEPLPIVYYDDSSNGGGGGG

SEQ ID NO: 5052 - protein, 29 aa, Artificial Sequence
  Cyclic GFR-binding peptide
GTPGPGGVPQRLEPLPIVYYDSSNNAAAA

SEQ ID NO: 5053 - protein, 32 aa, Artificial Sequence
  Cyclic GFR-binding peptide
WWFWGGGGVPQKTEPLPIVYYDDMGVAAAAAA

SEQ ID NO: 5054 - protein, 30 aa, Artificial Sequence
  Cyclic GFR-binding peptide
GTPGPGGGVPQDLEPLPIVYYDKGVVGGGG

SEQ ID NO: 5055 - protein, 29 aa, Artificial Sequence
  Cyclic GFR-binding peptide
WWFWGVPTELEPLPIVYYNDKQQGGGGGG

SEQ ID NO: 5056 - protein, 27 aa, Artificial Sequence
  Cyclic GFR-binding peptide
GTPGPVPEKMEPLPIVYYDAANNAAAA

SEQ ID NO: 5057 - protein, 30 aa, Artificial Sequence
  Cyclic GFR-binding peptide
WWFWGGAPTKLEPLPIVYYDSANNAAAAAA

SEQ ID NO: 5058 - protein, 28 aa, Artificial Sequence
  Cyclic GFR-binding peptide
GTPGPGAPTQLEPLPIVYYDDSSNGGGG

SEQ ID NO: 5059 - protein, 31 aa, Artificial Sequence
  Cyclic GFR-binding peptide
WWFWGGGVPTKLEPLPIVYYDNGRVGGGGGG

SEQ ID NO: 5060 - protein, 29 aa, Artificial Sequence
  Cyclic GFR-binding peptide
GTPGPGGTPTKMEPLPIVYYVGRKPAAAA

SEQ ID NO: 5061 - protein, 32 aa, Artificial Sequence
  Cyclic GFR-binding peptide
WWFWGGGGVPARLEPLPIVYYIGKTPAAAAAA

SEQ ID NO: 5062 - protein, 30 aa, Artificial Sequence
  Cyclic GFR-binding peptide
GTPGPGGGVPTRLEPLPIVYYVGRTPGGGG

SEQ ID NO: 5063 - protein, 29 aa, Artificial Sequence
  Cyclic GFR-binding peptide
WWFWGAPVKTEPLPIVYYRIKPHGGGGGG

SEQ ID NO: 5064 - protein, 27 aa, Artificial Sequence
  Cyclic GFR-binding peptide
GTPGPVSQDLEPLPIVYYRIKPHAAAA

SEQ ID NO: 5065 - protein, 30 aa, Artificial Sequence
  Cyclic GFR-binding peptide
WWFWGGVPTEEEPLPIVYYRIKPHAAAAAA

SEQ ID NO: 5066 - protein, 28 aa, Artificial Sequence
  Cyclic GFR-binding peptide
GTPGPGVPTGQEPLPIVYYRIKPHGGGG

SEQ ID NO: 5067 - protein, 31 aa, Artificial Sequence
  Cyclic GFR-binding peptide
WWFWGGGSRVHHEPLPIVYYEYVRKGGGGGG

SEQ ID NO: 5068 - protein, 29 aa, Artificial Sequence
  Cyclic GFR-binding peptide
GTPGPGGTQVQLEPLPIVYYEIVRKAAAA

SEQ ID NO: 5069 - protein, 30 aa, Artificial Sequence
  Cyclic GFR-binding peptide
WWFWGGGGVSQELEPLTILYYDENEKGGGG

SEQ ID NO: 5070 - protein, 32 aa, Artificial Sequence
  Cyclic GFR-binding peptide
GTPGPGGGVSQKMEPLTILYYDENKNGGGGGG

SEQ ID NO: 5071 - protein, 27 aa, Artificial Sequence
  Cyclic GFR-binding peptide
WWFWGVSQKLEPLTILYYDEYDKAAAA

SEQ ID NO: 5072 - protein, 29 aa, Artificial Sequence
  Cyclic GFR-binding peptide
GTPGPVSQQLEPLTILYYDDSSNAAAAAA

SEQ ID NO: 5073 - protein, 28 aa, Artificial Sequence
  Cyclic GFR-binding peptide
WWFWGGVSQRLEPLTILYYDDSSNGGGG

SEQ ID NO: 5074 - protein, 30 aa, Artificial Sequence
  Cyclic GFR-binding peptide
GTPGPGVSQKTEPLTILYYDDSSNGGGGGG

SEQ ID NO: 5075 - protein, 29 aa, Artificial Sequence
  Cyclic GFR-binding peptide
WWFWGGGVSQALEPLTILYYDSSNNAAAA

SEQ ID NO: 5076 - protein, 31 aa, Artificial Sequence
  Cyclic GFR-binding peptide
GTPGPGGVSQDLEPLTILYYDDMGVAAAAAA

SEQ ID NO: 5077 - protein, 30 aa, Artificial Sequence
  Cyclic GFR-binding peptide
WWFWGGGGVPTELEPLTILYYDKGVVGGGG

SEQ ID NO: 5078 - protein, 32 aa, Artificial Sequence
  Cyclic GFR-binding peptide
GTPGPGGGVPEKMEPLTILYYNDKQQGGGGGG

SEQ ID NO: 5079 - protein, 27 aa, Artificial Sequence
  Cyclic GFR-binding peptide
WWFWGAPTKLEPLTILYYDAANNAAAA

SEQ ID NO: 5080 - protein, 29 aa, Artificial Sequence
  Cyclic GFR-binding peptide
GTPGPAPTQLEPLTILYYDSANNAAAAAA

SEQ ID NO: 5081 - protein, 28 aa, Artificial Sequence
  Cyclic GFR-binding peptide
WWFWGGVPTKLEPLTILYYDDSSNGGGG

SEQ ID NO: 5082 - protein, 30 aa, Artificial Sequence
  Cyclic GFR-binding peptide
GTPGPGTPTKMEPLTILYYDNGRVGGGGGG

SEQ ID NO: 5083 - protein, 29 aa, Artificial Sequence
  Cyclic GFR-binding peptide
WWFWGGGVPARLEPLTILYYVGRKPAAAA

SEQ ID NO: 5084 - protein, 31 aa, Artificial Sequence
  Cyclic GFR-binding peptide
GTPGPGGVPTRLEPLTILYYIGKTPAAAAAA

SEQ ID NO: 5085 - protein, 30 aa, Artificial Sequence
  Cyclic GFR-binding peptide
WWFWGGGGAPVKTEPLTILYYVGRTPGGGG

SEQ ID NO: 5086 - protein, 32 aa, Artificial Sequence
  Cyclic GFR-binding peptide
GTPGPGGGVPQALEPLTILYYRIKPHGGGGGG

SEQ ID NO: 5087 - protein, 27 aa, Artificial Sequence
  Cyclic GFR-binding peptide
WWFWGVPTEEEPLTILYYRIKPHAAAA

SEQ ID NO: 5088 - protein, 29 aa, Artificial Sequence
  Cyclic GFR-binding peptide
GTPGPVPTGQEPLTILYYRIKPHAAAAAA

SEQ ID NO: 5089 - protein, 28 aa, Artificial Sequence
  Cyclic GFR-binding peptide
WWFWGGSRVHHEPLTILYYRIKPHGGGG

SEQ ID NO: 5090 - protein, 30 aa, Artificial Sequence
  Cyclic GFR-binding peptide
GTPGPGTQVQLEPLTILYYEYVRKGGGGGG

SEQ ID NO: 5091 - protein, 29 aa, Artificial Sequence
  Cyclic GFR-binding peptide
WWFWGGGVPQELEPLTILYYEIVRKAAAA

SEQ ID NO: 5092 - protein, 29 aa, Artificial Sequence
  Cyclic GFR-binding peptide
GTPGPGGVPQKMEPLTILYYDENEKGGGG

SEQ ID NO: 5093 - protein, 32 aa, Artificial Sequence
  Cyclic GFR-binding peptide
WWFWGGGGVPQKLEPLTILYYDENKNGGGGGG

SEQ ID NO: 5094 - protein, 30 aa, Artificial Sequence
  Cyclic GFR-binding peptide
GTPGPGGGVPQQLEPLTILYYDEYDKAAAA

SEQ ID NO: 5095 - protein, 29 aa, Artificial Sequence
  Cyclic GFR-binding peptide
WWFWGVPQRLEPLTILYYDDSSNAAAAAA

SEQ ID NO: 5096 - protein, 27 aa, Artificial Sequence
  Cyclic GFR-binding peptide
GTPGPVPQKTEPLTILYYDDSSNGGGG

SEQ ID NO: 5097 - protein, 30 aa, Artificial Sequence
  Cyclic GFR-binding peptide
WWFWGGVPQDLEPLTILYYDDSSNGGGGGG

SEQ ID NO: 5098 - protein, 28 aa, Artificial Sequence
  Cyclic GFR-binding peptide
GTPGPGVPTGQSNITMQIMDSSNNAAAA

SEQ ID NO: 5099 - protein, 31 aa, Artificial Sequence
  Cyclic GFR-binding peptide
WWFWGGGVPEKMSNITMQIMDDMGVAAAAAA

SEQ ID NO: 5100 - protein, 29 aa, Artificial Sequence
  Cyclic GFR-binding peptide
GTPGPGGAPTKLSNITMQIMDKGVVGGGG

SEQ ID NO: 5101 - protein, 32 aa, Artificial Sequence
  Cyclic GFR-binding peptide
WWFWGGGGAPTQLSNITMQIMNDKQQGGGGGG

SEQ ID NO: 5102 - protein, 30 aa, Artificial Sequence
  Cyclic GFR-binding peptide
GTPGPGGGTPTKMSNITMQIMDAANNAAAA

SEQ ID NO: 5103 - protein, 29 aa, Artificial Sequence
  Cyclic GFR-binding peptide
WWFWGVPARLSNITMQIMDSANNAAAAAA

SEQ ID NO: 5104 - protein, 27 aa, Artificial Sequence
  Cyclic GFR-binding peptide
GTPGPAPVKTSNITMQIMDDSSNGGGG

SEQ ID NO: 5105 - protein, 30 aa, Artificial Sequence
  Cyclic GFR-binding peptide
WWFWGGVPQALSNITMQIMDNGRVGGGGGG

SEQ ID NO: 5106 - protein, 28 aa, Artificial Sequence
  Cyclic GFR-binding peptide
GTPGPGVSQDLSNITMQIMVGRKPAAAA

SEQ ID NO: 5107 - protein, 31 aa, Artificial Sequence
  Cyclic GFR-binding peptide
WWFWGGGVPQDLSNITMQIMIGKTPAAAAAA

SEQ ID NO: 5108 - protein, 29 aa, Artificial Sequence
  Cyclic GFR-binding peptide
GTPGPGGSRVHHSNITMQIMVGRTPGGGG

SEQ ID NO: 5109 - protein, 32 aa, Artificial Sequence
  Cyclic GFR-binding peptide
WWFWGGGGTQVQLSNITMQIMRIKPHGGGGGG

SEQ ID NO: 5110 - protein, 30 aa, Artificial Sequence
  Cyclic GFR-binding peptide
GTPGPGGGSRVQLRSVKVAKVRIKPHAAAA

SEQ ID NO: 5111 - protein, 29 aa, Artificial Sequence
  Cyclic GFR-binding peptide
WWFWGVPTELRSVKVAKVRIKPHAAAAAA

SEQ ID NO: 5112 - protein, 27 aa, Artificial Sequence
  Cyclic GFR-binding peptide
GTPGPVPEKMRSVKVAKVRIKPHGGGG

SEQ ID NO: 5113 - protein, 30 aa, Artificial Sequence
  Cyclic GFR-binding peptide
WWFWGGAPTKLRSVKVAKVEYVRKGGGGGG

SEQ ID NO: 5114 - protein, 28 aa, Artificial Sequence
  Cyclic GFR-binding peptide
GTPGPGAPTQLRSVKVAKVEIVRKAAAA

SEQ ID NO: 5115 - protein, 29 aa, Artificial Sequence
  Cyclic GFR-binding peptide
WWFWGGGVPTKLRSVKVAKVDENEKGGGG

SEQ ID NO: 5116 - protein, 31 aa, Artificial Sequence
  Cyclic GFR-binding peptide
GTPGPGGTPTKMRSVKVAKVDENKNGGGGGG

SEQ ID NO: 5117 - protein, 30 aa, Artificial Sequence
  Cyclic GFR-binding peptide
WWFWGGGGVPARLRSVKVAKVDEYDKAAAA

SEQ ID NO: 5118 - protein, 32 aa, Artificial Sequence
  Cyclic GFR-binding peptide
GTPGPGGGVPTRLRSVKVAKVDDSSNAAAAAA

SEQ ID NO: 5119 - protein, 27 aa, Artificial Sequence
  Cyclic GFR-binding peptide
WWFWGAPVKTRSVKVAKVDDSSNGGGG

SEQ ID NO: 5120 - protein, 29 aa, Artificial Sequence
  Cyclic GFR-binding peptide
GTPGPVPQALRSVKVAKVDDSSNGGGGGG

SEQ ID NO: 5121 - protein, 28 aa, Artificial Sequence
  Cyclic GFR-binding peptide
WWFWGGVSQDLRSVKVAKVDSSNNAAAA

SEQ ID NO: 5122 - protein, 30 aa, Artificial Sequence
  Cyclic GFR-binding peptide
GTPGPGVPQDLRSVKVAKVDDMGVAAAAAA

SEQ ID NO: 5123 - protein, 29 aa, Artificial Sequence
  Cyclic GFR-binding peptide
WWFWGGGVPTEERSVKVAKVDKGVVGGGG

SEQ ID NO: 5124 - protein, 31 aa, Artificial Sequence
  Cyclic GFR-binding peptide
GTPGPGGVPTGQRSVKVAKVNDKQQGGGGGG

SEQ ID NO: 5125 - protein, 30 aa, Artificial Sequence
  Cyclic GFR-binding peptide
WWFWGGGGTQVQLRSVKVAKVDAANNAAAA

SEQ ID NO: 5126 - protein, 32 aa, Artificial Sequence
  Cyclic GFR-binding peptide
GTPGPGGGTQVHHRPVQVRKIDSANNAAAAAA

SEQ ID NO: 5127 - protein, 27 aa, Artificial Sequence
  Cyclic GFR-binding peptide
WWFWGVPTELRPVQVRKIDDSSNGGGG

SEQ ID NO: 5128 - protein, 29 aa, Artificial Sequence
  Cyclic GFR-binding peptide
GTPGPVPEKMRPVQVRKIDNGRVGGGGGG

SEQ ID NO: 5129 - protein, 28 aa, Artificial Sequence
  Cyclic GFR-binding peptide
WWFWGGAPTKLRPVQVRKIVGRKPAAAA

SEQ ID NO: 5130 - protein, 30 aa, Artificial Sequence
  Cyclic GFR-binding peptide
GTPGPGAPTQLRPVQVRKIIGKTPAAAAAA

SEQ ID NO: 5131 - protein, 29 aa, Artificial Sequence
  Cyclic GFR-binding peptide
WWFWGGGVPTKLRPVQVRKIVGRTPGGGG

SEQ ID NO: 5132 - protein, 31 aa, Artificial Sequence
  Cyclic GFR-binding peptide
GTPGPGGTPTKMRPVQVRKIRIKPHGGGGGG

SEQ ID NO: 5133 - protein, 30 aa, Artificial Sequence
  Cyclic GFR-binding peptide
WWFWGGGGVPARLRPVQVRKIRIKPHAAAA

SEQ ID NO: 5134 - protein, 32 aa, Artificial Sequence
  Cyclic GFR-binding peptide
GTPGPGGGVPTRLRPVQVRKIRIKPHAAAAAA

SEQ ID NO: 5135 - protein, 27 aa, Artificial Sequence
  Cyclic GFR-binding peptide
WWFWGAPVKTRPVQVRKIRIKPHGGGG

SEQ ID NO: 5136 - protein, 29 aa, Artificial Sequence
  Cyclic GFR-binding peptide
GTPGPVPQALRPVQVRKIEYVRKGGGGGG

SEQ ID NO: 5137 - protein, 28 aa, Artificial Sequence
  Cyclic GFR-binding peptide
WWFWGGVSQDLRPVQVRKIEIVRKAAAA

SEQ ID NO: 5138 - protein, 28 aa, Artificial Sequence
  Cyclic GFR-binding peptide
GTPGPGVPQDLRPVQVRKIDENEKGGGG

SEQ ID NO: 5139 - protein, 31 aa, Artificial Sequence
  Cyclic GFR-binding peptide
WWFWGGGVPTEERPVQVRKIDENKNGGGGGG

SEQ ID NO: 5140 - protein, 29 aa, Artificial Sequence
  Cyclic GFR-binding peptide
GTPGPGGVPTGQRPVQVRKIDEYDKAAAA

SEQ ID NO: 5141 - protein, 32 aa, Artificial Sequence
  Cyclic GFR-binding peptide
WWFWGGGGSRVHHRPVQVRKIDDSSNAAAAAA

SEQ ID NO: 5142 - protein, 27 aa, Artificial Sequence
  Cyclic GFR-binding peptide
GTPGPGGGSAISILYLDENEKVVGGGG

SEQ ID NO: 5143 - protein, 26 aa, Artificial Sequence
  Cyclic GFR-binding peptide
WWFWGSAISVLYLDENKNVVGGGGGG

SEQ ID NO: 5144 - protein, 24 aa, Artificial Sequence
  Cyclic GFR-binding peptide
GTPGPSSLSMLFFDEYDKVVAAAA

SEQ ID NO: 5145 - protein, 27 aa, Artificial Sequence
  Cyclic GFR-binding peptide
WWFWGGSSLSVLFFDDSSNVIAAAAAA

SEQ ID NO: 5146 - protein, 25 aa, Artificial Sequence
  Cyclic GFR-binding peptide
GTPGPGNAISMLYFDDSSNVIGGGG

SEQ ID NO: 5147 - protein, 28 aa, Artificial Sequence
  Cyclic GFR-binding peptide
WWFWGGGNAISILYFDDSSNVIGGGGGG

SEQ ID NO: 5148 - protein, 26 aa, Artificial Sequence
  Cyclic GFR-binding peptide
GTPGPGGSATSMLYYDSSNNVIAAAA

SEQ ID NO: 5149 - protein, 29 aa, Artificial Sequence
  Cyclic GFR-binding peptide
WWFWGGGGSATSILYYDDMGVPTAAAAAA

SEQ ID NO: 5150 - protein, 27 aa, Artificial Sequence
  Cyclic GFR-binding peptide
GTPGPGGGSPISMLYKDKGVVTYGGGG

SEQ ID NO: 5151 - protein, 26 aa, Artificial Sequence
  Cyclic GFR-binding peptide
WWFWGSPISILYKNDKQQIIGGGGGG

SEQ ID NO: 5152 - protein, 24 aa, Artificial Sequence
  Cyclic GFR-binding peptide
GTPGPEPISMLYLDAANNVVAAAA

SEQ ID NO: 5153 - protein, 27 aa, Artificial Sequence
  Cyclic GFR-binding peptide
WWFWGGEPISVLYLDSANNVVAAAAAA

SEQ ID NO: 5154 - protein, 25 aa, Artificial Sequence
  Cyclic GFR-binding peptide
GTPGPGSPINILYFDDSSNVIGGGG

SEQ ID NO: 5155 - protein, 28 aa, Artificial Sequence
  Cyclic GFR-binding peptide
WWFWGGGSPINVLYFDNGRVLLGGGGGG

SEQ ID NO: 5156 - protein, 26 aa, Artificial Sequence
  Cyclic GFR-binding peptide
GTPGPGGSPISMLYIVGRKPKVAAAA

SEQ ID NO: 5157 - protein, 29 aa, Artificial Sequence
  Cyclic GFR-binding peptide
WWFWGGGGSPISVLYIIGKTPKIAAAAAA

SEQ ID NO: 5158 - protein, 27 aa, Artificial Sequence
  Cyclic GFR-binding peptide
GTPGPGGGSPISMLFIVGRTPKVGGGG

SEQ ID NO: 5159 - protein, 28 aa, Artificial Sequence
  Cyclic GFR-binding peptide
WWFWGSPISVLFIRIKPHQGQHGGGGGG

SEQ ID NO: 5160 - protein, 26 aa, Artificial Sequence
  Cyclic GFR-binding peptide
GTPGPKPLSILYVRIKPHQGQHAAAA

SEQ ID NO: 5161 - protein, 29 aa, Artificial Sequence
  Cyclic GFR-binding peptide
WWFWGGKPLSVLYVRIKPHQGQHAAAAAA

SEQ ID NO: 5162 - protein, 27 aa, Artificial Sequence
  Cyclic GFR-binding peptide
GTPGPGEPLPMVYYRIKPHQGQHGGGG

SEQ ID NO: 5163 - protein, 30 aa, Artificial Sequence
  Cyclic GFR-binding peptide
WWFWGGGEPLPVVYYEYVRKKPKLGGGGGG

SEQ ID NO: 5164 - protein, 28 aa, Artificial Sequence
  Cyclic GFR-binding peptide
GTPGPGGEPLTMLYYEIVRKKPIFAAAA

SEQ ID NO: 5165 - protein, 29 aa, Artificial Sequence
  Cyclic GFR-binding peptide
WWFWGGGGEPLTVLYYDENEKVVAAAAAA

SEQ ID NO: 5166 - protein, 27 aa, Artificial Sequence
  Cyclic GFR-binding peptide
GTPGPGGGSNITIQIMDENKNVVGGGG

SEQ ID NO: 5167 - protein, 26 aa, Artificial Sequence
  Cyclic GFR-binding peptide
WWFWGSNITVQIMDEYDKVVGGGGGG

SEQ ID NO: 5168 - protein, 24 aa, Artificial Sequence
  Cyclic GFR-binding peptide
GTPGPRSVKMAKVDDSSNVIAAAA

SEQ ID NO: 5169 - protein, 27 aa, Artificial Sequence
  Cyclic GFR-binding peptide
WWFWGGRSVKIAKVDDSSNVIAAAAAA

SEQ ID NO: 5170 - protein, 25 aa, Artificial Sequence
  Cyclic GFR-binding peptide
GTPGPGRPVQMRKIDDSSNVIGGGG

SEQ ID NO: 5171 - protein, 28 aa, Artificial Sequence
  Cyclic GFR-binding peptide
WWFWGGGRPVQIRKIDSSNNVIGGGGGG

SEQ ID NO: 5172 - protein, 26 aa, Artificial Sequence
  Cyclic GFR-binding peptide
GTPGPGGSAISMLYLDDMGVPTAAAA

SEQ ID NO: 5173 - protein, 29 aa, Artificial Sequence
  Cyclic GFR-binding peptide
WWFWGGGGSSLSILFFDKGVVTYAAAAAA

SEQ ID NO: 5174 - protein, 27 aa, Artificial Sequence
  Cyclic GFR-binding peptide
GTPGPGGGNAISVLYFNDKQQIIGGGG

SEQ ID NO: 5175 - protein, 26 aa, Artificial Sequence
  Cyclic GFR-binding peptide
WWFWGSATSVLYYDAANNVVGGGGGG

SEQ ID NO: 5176 - protein, 24 aa, Artificial Sequence
  Cyclic GFR-binding peptide
GTPGPSPISVLYKDSANNVVAAAA

SEQ ID NO: 5177 - protein, 27 aa, Artificial Sequence
  Cyclic GFR-binding peptide
WWFWGGEPISILYLDDSSNVIAAAAAA

SEQ ID NO: 5178 - protein, 25 aa, Artificial Sequence
  Cyclic GFR-binding peptide
GTPGPGSPINMLYFDNGRVLLGGGG

SEQ ID NO: 5179 - protein, 28 aa, Artificial Sequence
  Cyclic GFR-binding peptide
WWFWGGGSPISILYIVGRKPKVGGGGGG

SEQ ID NO: 5180 - protein, 26 aa, Artificial Sequence
  Cyclic GFR-binding peptide
GTPGPGGSPISILFIIGKTPKIAAAA

SEQ ID NO: 5181 - protein, 29 aa, Artificial Sequence
  Cyclic GFR-binding peptide
WWFWGGGGKPLSMLYVVGRTPKVAAAAAA

SEQ ID NO: 5182 - protein, 29 aa, Artificial Sequence
  Cyclic GFR-binding peptide
GTPGPGGGEPLPIVYYRIKPHQGQHGGGG

SEQ ID NO: 5183 - protein, 28 aa, Artificial Sequence
  Cyclic GFR-binding peptide
WWFWGEPLTILYYRIKPHQGQHGGGGGG

SEQ ID NO: 5184 - protein, 26 aa, Artificial Sequence
  Cyclic GFR-binding peptide
GTPGPSNITMQIMRIKPHQGQHAAAA

SEQ ID NO: 5185 - protein, 29 aa, Artificial Sequence
  Cyclic GFR-binding peptide
WWFWGGRSVKVAKVRIKPHQGQHAAAAAA

SEQ ID NO: 5186 - protein, 27 aa, Artificial Sequence
  Cyclic GFR-binding peptide
GTPGPGRPVQVRKIEYVRKKPKLGGGG

SEQ ID NO: 5187 - protein, 20 aa, Artificial Sequence
  Cyclic GFR-binding peptide
GTPGPGGGSAISILYLGGGG

SEQ ID NO: 5188 - protein, 19 aa, Artificial Sequence
  Cyclic GFR-binding peptide
WWFWGSAISVLYLGGGGGG

SEQ ID NO: 5189 - protein, 17 aa, Artificial Sequence
  Cyclic GFR-binding peptide
GTPGPSSLSMLFFAAAA

SEQ ID NO: 5190 - protein, 20 aa, Artificial Sequence
  Cyclic GFR-binding peptide
WWFWGGSSLSVLFFAAAAAA

SEQ ID NO: 5191 - protein, 18 aa, Artificial Sequence
  Cyclic GFR-binding peptide
GTPGPGNAISMLYFGGGG

SEQ ID NO: 5192 - protein, 21 aa, Artificial Sequence
  Cyclic GFR-binding peptide
WWFWGGGNAISILYFGGGGGG

SEQ ID NO: 5193 - protein, 19 aa, Artificial Sequence
  Cyclic GFR-binding peptide
GTPGPGGSATSMLYYAAAA

SEQ ID NO: 5194 - protein, 22 aa, Artificial Sequence
  Cyclic GFR-binding peptide
WWFWGGGGSATSILYYAAAAAA

SEQ ID NO: 5195 - protein, 20 aa, Artificial Sequence
  Cyclic GFR-binding peptide
GTPGPGGGSPISMLYKGGGG

SEQ ID NO: 5196 - protein, 19 aa, Artificial Sequence
  Cyclic GFR-binding peptide
WWFWGSPISILYKGGGGGG

SEQ ID NO: 5197 - protein, 17 aa, Artificial Sequence
  Cyclic GFR-binding peptide
GTPGPEPISMLYLAAAA

SEQ ID NO: 5198 - protein, 20 aa, Artificial Sequence
  Cyclic GFR-binding peptide
WWFWGGEPISVLYLAAAAAA

SEQ ID NO: 5199 - protein, 18 aa, Artificial Sequence
  Cyclic GFR-binding peptide
GTPGPGSPINILYFGGGG

SEQ ID NO: 5200 - protein, 21 aa, Artificial Sequence
  Cyclic GFR-binding peptide
WWFWGGGSPINVLYFGGGGGG

SEQ ID NO: 5201 - protein, 19 aa, Artificial Sequence
  Cyclic GFR-binding peptide
GTPGPGGSPISMLYIAAAA

SEQ ID NO: 5202 - protein, 22 aa, Artificial Sequence
  Cyclic GFR-binding peptide
WWFWGGGGSPISVLYIAAAAAA

SEQ ID NO: 5203 - protein, 20 aa, Artificial Sequence
  Cyclic GFR-binding peptide
GTPGPGGGSPISMLFIGGGG

SEQ ID NO: 5204 - protein, 19 aa, Artificial Sequence
  Cyclic GFR-binding peptide
WWFWGSPISVLFIGGGGGG

SEQ ID NO: 5205 - protein, 17 aa, Artificial Sequence
  Cyclic GFR-binding peptide
GTPGPKPLSILYVAAAA

SEQ ID NO: 5206 - protein, 20 aa, Artificial Sequence
  Cyclic GFR-binding peptide
WWFWGGKPLSVLYVAAAAAA

SEQ ID NO: 5207 - protein, 18 aa, Artificial Sequence
  Cyclic GFR-binding peptide
GTPGPGEPLPMVYYGGGG

SEQ ID NO: 5208 - protein, 21 aa, Artificial Sequence
  Cyclic GFR-binding peptide
WWFWGGGEPLPVVYYGGGGGG

SEQ ID NO: 5209 - protein, 19 aa, Artificial Sequence
  Cyclic GFR-binding peptide
GTPGPGGEPLTMLYYAAAA

SEQ ID NO: 5210 - protein, 22 aa, Artificial Sequence
  Cyclic GFR-binding peptide
WWFWGGGGEPLTVLYYAAAAAA

SEQ ID NO: 5211 - protein, 20 aa, Artificial Sequence
  Cyclic GFR-binding peptide
GTPGPGGGSNITIQIMGGGG

SEQ ID NO: 5212 - protein, 19 aa, Artificial Sequence
  Cyclic GFR-binding peptide
WWFWGSNITVQIMGGGGGG

SEQ ID NO: 5213 - protein, 17 aa, Artificial Sequence
  Cyclic GFR-binding peptide
GTPGPRSVKMAKVAAAA

SEQ ID NO: 5214 - protein, 20 aa, Artificial Sequence
  Cyclic GFR-binding peptide
WWFWGGRSVKIAKVAAAAAA

SEQ ID NO: 5215 - protein, 18 aa, Artificial Sequence
  Cyclic GFR-binding peptide
GTPGPGRPVQMRKIGGGG

SEQ ID NO: 5216 - protein, 21 aa, Artificial Sequence
  Cyclic GFR-binding peptide
WWFWGGGRPVQIRKIGGGGGG

SEQ ID NO: 5217 - protein, 19 aa, Artificial Sequence
  Cyclic GFR-binding peptide
GTPGPGGSAISMLYLAAAA

SEQ ID NO: 5218 - protein, 22 aa, Artificial Sequence
  Cyclic GFR-binding peptide
WWFWGGGGSSLSILFFAAAAAA

SEQ ID NO: 5219 - protein, 20 aa, Artificial Sequence
  Cyclic GFR-binding peptide
GTPGPGGGNAISVLYFGGGG

SEQ ID NO: 5220 - protein, 19 aa, Artificial Sequence
  Cyclic GFR-binding peptide
WWFWGSATSVLYYGGGGGG

SEQ ID NO: 5221 - protein, 17 aa, Artificial Sequence
  Cyclic GFR-binding peptide
GTPGPSPISVLYKAAAA

SEQ ID NO: 5222 - protein, 20 aa, Artificial Sequence
  Cyclic GFR-binding peptide
WWFWGGEPISILYLAAAAAA

SEQ ID NO: 5223 - protein, 18 aa, Artificial Sequence
  Cyclic GFR-binding peptide
GTPGPGSPINMLYFGGGG

SEQ ID NO: 5224 - protein, 21 aa, Artificial Sequence
  Cyclic GFR-binding peptide
WWFWGGGSPISILYIGGGGGG

SEQ ID NO: 5225 - protein, 19 aa, Artificial Sequence
  Cyclic GFR-binding peptide
GTPGPGGSPISILFIAAAA

SEQ ID NO: 5226 - protein, 22 aa, Artificial Sequence
  Cyclic GFR-binding peptide
WWFWGGGGKPLSMLYVAAAAAA

SEQ ID NO: 5227 - protein, 20 aa, Artificial Sequence
  Cyclic GFR-binding peptide
GTPGPGGGEPLPIVYYGGGG

SEQ ID NO: 5228 - protein, 19 aa, Artificial Sequence
  Cyclic GFR-binding peptide
WWFWGEPLTILYYGGGGGG

SEQ ID NO: 5229 - protein, 17 aa, Artificial Sequence
  Cyclic GFR-binding peptide
GTPGPSNITMQIMAAAA

SEQ ID NO: 5230 - protein, 20 aa, Artificial Sequence
  Cyclic GFR-binding peptide
WWFWGGRSVKVAKVAAAAAA

SEQ ID NO: 5231 - protein, 18 aa, Artificial Sequence
  Cyclic GFR-binding peptide
GTPGPGRPVQVRKIGGGG

SEQ ID NO: 5232 - protein, 15 aa, Artificial Sequence
  Cyclic GFR-binding peptide
SAISILYLGGGGGGG

SEQ ID NO: 5233 - protein, 16 aa, Artificial Sequence
  Cyclic GFR-binding peptide
SAISVLYLGGGGGGGG

SEQ ID NO: 5234 - protein, 15 aa, Artificial Sequence
  Cyclic GFR-binding peptide
SSLSMLFFAAAAAAA

SEQ ID NO: 5235 - protein, 16 aa, Artificial Sequence
  Cyclic GFR-binding peptide
SSLSVLFFAAAAAAAA

SEQ ID NO: 5236 - protein, 15 aa, Artificial Sequence
  Cyclic GFR-binding peptide
NAISMLYFGGGGGGG

SEQ ID NO: 5237 - protein, 16 aa, Artificial Sequence
  Cyclic GFR-binding peptide
NAISILYFGGGGGGGG

SEQ ID NO: 5238 - protein, 15 aa, Artificial Sequence
  Cyclic GFR-binding peptide
SATSMLYYAAAAAAA

SEQ ID NO: 5239 - protein, 16 aa, Artificial Sequence
  Cyclic GFR-binding peptide
SATSILYYAAAAAAAA

SEQ ID NO: 5240 - protein, 15 aa, Artificial Sequence
  Cyclic GFR-binding peptide
SPISMLYKGGGGGGG

SEQ ID NO: 5241 - protein, 16 aa, Artificial Sequence
  Cyclic GFR-binding peptide
SPISILYKGGGGGGGG

SEQ ID NO: 5242 - protein, 15 aa, Artificial Sequence
  Cyclic GFR-binding peptide
EPISMLYLAAAAAAA

SEQ ID NO: 5243 - protein, 16 aa, Artificial Sequence
  Cyclic GFR-binding peptide
EPISVLYLAAAAAAAA

SEQ ID NO: 5244 - protein, 15 aa, Artificial Sequence
  Cyclic GFR-binding peptide
SPINILYFGGGGGGG

SEQ ID NO: 5245 - protein, 16 aa, Artificial Sequence
  Cyclic GFR-binding peptide
SPINVLYFGGGGGGGG

SEQ ID NO: 5246 - protein, 15 aa, Artificial Sequence
  Cyclic GFR-binding peptide
SPISMLYIAAAAAAA

SEQ ID NO: 5247 - protein, 16 aa, Artificial Sequence
  Cyclic GFR-binding peptide
SPISVLYIAAAAAAAA

SEQ ID NO: 5248 - protein, 15 aa, Artificial Sequence
  Cyclic GFR-binding peptide
SPISMLFIGGGGGGG

SEQ ID NO: 5249 - protein, 16 aa, Artificial Sequence
  Cyclic GFR-binding peptide
SPISVLFIGGGGGGGG

SEQ ID NO: 5250 - protein, 15 aa, Artificial Sequence
  Cyclic GFR-binding peptide
KPLSILYVAAAAAAA

SEQ ID NO: 5251 - protein, 16 aa, Artificial Sequence
  Cyclic GFR-binding peptide
KPLSVLYVAAAAAAAA

SEQ ID NO: 5252 - protein, 15 aa, Artificial Sequence
  Cyclic GFR-binding peptide
EPLPMVYYGGGGGGG

SEQ ID NO: 5253 - protein, 16 aa, Artificial Sequence
  Cyclic GFR-binding peptide
EPLPVVYYGGGGGGGG

SEQ ID NO: 5254 - protein, 15 aa, Artificial Sequence
  Cyclic GFR-binding peptide
EPLTMLYYAAAAAAA

SEQ ID NO: 5255 - protein, 16 aa, Artificial Sequence
  Cyclic GFR-binding peptide
EPLTVLYYAAAAAAAA

SEQ ID NO: 5256 - protein, 15 aa, Artificial Sequence
  Cyclic GFR-binding peptide
SNITIQIMGGGGGGG

SEQ ID NO: 5257 - protein, 16 aa, Artificial Sequence
  Cyclic GFR-binding peptide
SNITVQIMGGGGGGGG

SEQ ID NO: 5258 - protein, 15 aa, Artificial Sequence
  Cyclic GFR-binding peptide
RSVKMAKVAAAAAAA

SEQ ID NO: 5259 - protein, 16 aa, Artificial Sequence
  Cyclic GFR-binding peptide
RSVKIAKVAAAAAAAA

SEQ ID NO: 5260 - protein, 15 aa, Artificial Sequence
  Cyclic GFR-binding peptide
RPVQMRKIGGGGGGG

SEQ ID NO: 5261 - protein, 16 aa, Artificial Sequence
  Cyclic GFR-binding peptide
RPVQIRKIGGGGGGGG

SEQ ID NO: 5262 - protein, 15 aa, Artificial Sequence
  Cyclic GFR-binding peptide
SAISMLYLAAAAAAA

SEQ ID NO: 5263 - protein, 16 aa, Artificial Sequence
  Cyclic GFR-binding peptide
SSLSILFFAAAAAAAA

SEQ ID NO: 5264 - protein, 16 aa, Artificial Sequence
  Cyclic GFR-binding peptide
SATSVLYYGGGGGGGG

SEQ ID NO: 5265 - protein, 15 aa, Artificial Sequence
  Cyclic GFR-binding peptide
SPISVLYKAAAAAAA

SEQ ID NO: 5266 - protein, 16 aa, Artificial Sequence
  Cyclic GFR-binding peptide
EPISILYLAAAAAAAA

SEQ ID NO: 5267 - protein, 15 aa, Artificial Sequence
  Cyclic GFR-binding peptide
SPINMLYFGGGGGGG

SEQ ID NO: 5268 - protein, 15 aa, Artificial Sequence
  Cyclic GFR-binding peptide
SPISILFIAAAAAAA

SEQ ID NO: 5269 - protein, 16 aa, Artificial Sequence
  Cyclic GFR-binding peptide
KPLSMLYVAAAAAAAA

SEQ ID NO: 5270 - protein, 15 aa, Artificial Sequence
  Cyclic GFR-binding peptide
EPLPIVYYGGGGGGG

SEQ ID NO: 5271 - protein, 16 aa, Artificial Sequence
  Cyclic GFR-binding peptide
EPLTILYYGGGGGGGG

SEQ ID NO: 5272 - protein, 15 aa, Artificial Sequence
  Cyclic GFR-binding peptide
SNITMQIMAAAAAAA

SEQ ID NO: 5273 - protein, 16 aa, Artificial Sequence
  Cyclic GFR-binding peptide
RSVKVAKVAAAAAAAA

SEQ ID NO: 5274 - protein, 15 aa, Artificial Sequence
  Cyclic GFR-binding peptide
RPVQVRKIGGGGGGG

SEQ ID NO: 5275 - protein, 27 aa, Artificial Sequence
  Cyclic GFR-binding peptide
RIKPHVPTKMSAISMLYLDENEKGGGG

SEQ ID NO: 5276 - protein, 29 aa, Artificial Sequence
  Cyclic GFR-binding peptide
EYVRKVPTKLSAISMLYLDENKNGGGGGG

SEQ ID NO: 5277 - protein, 27 aa, Artificial Sequence
  Cyclic GFR-binding peptide
EIVRKVPTQLSAISMLYLDEYDKAAAA

SEQ ID NO: 5278 - protein, 29 aa, Artificial Sequence
  Cyclic GFR-binding peptide
DENEKVPTRLSAISMLYLDDSSNAAAAAA

SEQ ID NO: 5279 - protein, 27 aa, Artificial Sequence
  Cyclic GFR-binding peptide
DENKNVPTKTSAISMLYLDDSSNGGGG

SEQ ID NO: 5280 - protein, 29 aa, Artificial Sequence
  Cyclic GFR-binding peptide
DEYDKVPTALSAISMLYLDDSSNGGGGGG

SEQ ID NO: 5281 - protein, 27 aa, Artificial Sequence
  Cyclic GFR-binding peptide
DDSSNVPTDLSAISMLYLDSSNNAAAA

SEQ ID NO: 5282 - protein, 29 aa, Artificial Sequence
  Cyclic GFR-binding peptide
DDSSNVPEKMSAISMLYLDDMGVAAAAAA

SEQ ID NO: 5283 - protein, 27 aa, Artificial Sequence
  Cyclic GFR-binding peptide
DDSSNAPTKLSAISMLYLDKGVVGGGG

SEQ ID NO: 5284 - protein, 29 aa, Artificial Sequence
  Cyclic GFR-binding peptide
DSSNNAPTQLSAISMLYLNDKQQGGGGGG

SEQ ID NO: 5285 - protein, 27 aa, Artificial Sequence
  Cyclic GFR-binding peptide
DDMGVTPTKMSAISMLYLDAANNAAAA

SEQ ID NO: 5286 - protein, 29 aa, Artificial Sequence
  Cyclic GFR-binding peptide
DKGVVVPARLSAISMLYLDSANNAAAAAA

SEQ ID NO: 5287 - protein, 27 aa, Artificial Sequence
  Cyclic GFR-binding peptide
NDKQQAPVKTSAISMLYLDDSSNGGGG

SEQ ID NO: 5288 - protein, 29 aa, Artificial Sequence
  Cyclic GFR-binding peptide
DAANNVPQALSAISMLYLDNGRVGGGGGG

SEQ ID NO: 5289 - protein, 27 aa, Artificial Sequence
  Cyclic GFR-binding peptide
DSANNVSQDLSAISMLYLVGRKPAAAA

SEQ ID NO: 5290 - protein, 29 aa, Artificial Sequence
  Cyclic GFR-binding peptide
DDSSNVPQDLSAISMLYLIGKTPAAAAAA

SEQ ID NO: 5291 - protein, 27 aa, Artificial Sequence
  Cyclic GFR-binding peptide
DNGRVSRVHHSAISMLYLVGRTPGGGG

SEQ ID NO: 5292 - protein, 29 aa, Artificial Sequence
  Cyclic GFR-binding peptide
VGRKPTQVQLSAISMLYLRIKPHGGGGGG

SEQ ID NO: 5293 - protein, 27 aa, Artificial Sequence
  Cyclic GFR-binding peptide
IGKTPVPEELSSLSILFFRIKPHAAAA

SEQ ID NO: 5294 - protein, 29 aa, Artificial Sequence
  Cyclic GFR-binding peptide
VGRTPVPEKLSSLSILFFRIKPHAAAAAA

SEQ ID NO: 5295 - protein, 27 aa, Artificial Sequence
  Cyclic GFR-binding peptide
RIKPHVPEQLSSLSILFFRIKPHGGGG

SEQ ID NO: 5296 - protein, 29 aa, Artificial Sequence
  Cyclic GFR-binding peptide
RIKPHVPEKMSSLSILFFEYVRKGGGGGG

SEQ ID NO: 5297 - protein, 27 aa, Artificial Sequence
  Cyclic GFR-binding peptide
RIKPHVPERLSSLSILFFEIVRKAAAA

SEQ ID NO: 5298 - protein, 27 aa, Artificial Sequence
  Cyclic GFR-binding peptide
DENEKVPEKTSSLSILFFDENEKGGGG

SEQ ID NO: 5299 - protein, 29 aa, Artificial Sequence
  Cyclic GFR-binding peptide
DENKNVPEALSSLSILFFDENKNGGGGGG

SEQ ID NO: 5300 - protein, 27 aa, Artificial Sequence
  Cyclic GFR-binding peptide
DEYDKVPEDLSSLSILFFDEYDKAAAA

SEQ ID NO: 5301 - protein, 29 aa, Artificial Sequence
  Cyclic GFR-binding peptide
DDSSNVPTELSSLSILFFDDSSNAAAAAA

SEQ ID NO: 5302 - protein, 27 aa, Artificial Sequence
  Cyclic GFR-binding peptide
DDSSNAPTKLSSLSILFFDDSSNGGGG

SEQ ID NO: 5303 - protein, 29 aa, Artificial Sequence
  Cyclic GFR-binding peptide
DDSSNAPTQLSSLSILFFDDSSNGGGGGG

SEQ ID NO: 5304 - protein, 27 aa, Artificial Sequence
  Cyclic GFR-binding peptide
DSSNNVPTKLSSLSILFFDSSNNAAAA

SEQ ID NO: 5305 - protein, 29 aa, Artificial Sequence
  Cyclic GFR-binding peptide
DDMGVTPTKMSSLSILFFDDMGVAAAAAA

SEQ ID NO: 5306 - protein, 27 aa, Artificial Sequence
  Cyclic GFR-binding peptide
DKGVVVPARLSSLSILFFDKGVVGGGG

SEQ ID NO: 5307 - protein, 29 aa, Artificial Sequence
  Cyclic GFR-binding peptide
NDKQQVPTRLSSLSILFFNDKQQGGGGGG

SEQ ID NO: 5308 - protein, 27 aa, Artificial Sequence
  Cyclic GFR-binding peptide
DAANNAPVKTSSLSILFFDAANNAAAA

SEQ ID NO: 5309 - protein, 29 aa, Artificial Sequence
  Cyclic GFR-binding peptide
DSANNVPQALSSLSILFFDSANNAAAAAA

SEQ ID NO: 5310 - protein, 27 aa, Artificial Sequence
  Cyclic GFR-binding peptide
DDSSNVSQDLSSLSILFFDDSSNGGGG

SEQ ID NO: 5311 - protein, 29 aa, Artificial Sequence
  Cyclic GFR-binding peptide
DNGRVVPQDLSSLSILFFDNGRVGGGGGG

SEQ ID NO: 5312 - protein, 27 aa, Artificial Sequence
  Cyclic GFR-binding peptide
VGRKPVPTEESSLSILFFVGRKPAAAA

SEQ ID NO: 5313 - protein, 29 aa, Artificial Sequence
  Cyclic GFR-binding peptide
IGKTPVPTGQSSLSILFFIGKTPAAAAAA

SEQ ID NO: 5314 - protein, 27 aa, Artificial Sequence
  Cyclic GFR-binding peptide
VGRTPSRVHHSSLSILFFVGRTPGGGG

SEQ ID NO: 5315 - protein, 29 aa, Artificial Sequence
  Cyclic GFR-binding peptide
RIKPHTQVQLSSLSILFFRIKPHGGGGGG

SEQ ID NO: 5316 - protein, 27 aa, Artificial Sequence
  Cyclic GFR-binding peptide
RIKPHAPTELNAISVLYFRIKPHAAAA

SEQ ID NO: 5317 - protein, 29 aa, Artificial Sequence
  Cyclic GFR-binding peptide
RIKPHAPTKMNAISVLYFRIKPHAAAAAA

SEQ ID NO: 5318 - protein, 27 aa, Artificial Sequence
  Cyclic GFR-binding peptide
RIKPHAPTKLNAISVLYFRIKPHGGGG

SEQ ID NO: 5319 - protein, 29 aa, Artificial Sequence
  Cyclic GFR-binding peptide
EYVRKAPTRLNAISVLYFEYVRKGGGGGG

SEQ ID NO: 5320 - protein, 27 aa, Artificial Sequence
  Cyclic GFR-binding peptide
EIVRKAPTKTNAISVLYFEIVRKAAAA

SEQ ID NO: 5321 - protein, 27 aa, Artificial Sequence
  Cyclic GFR-binding peptide
DENEKAPTALNAISVLYFDENEKGGGG

SEQ ID NO: 5322 - protein, 29 aa, Artificial Sequence
  Cyclic GFR-binding peptide
DENKNAPTDLNAISVLYFDENKNGGGGGG

SEQ ID NO: 5323 - protein, 27 aa, Artificial Sequence
  Cyclic GFR-binding peptide
DEYDKVPTELNAISVLYFDEYDKAAAA

SEQ ID NO: 5324 - protein, 29 aa, Artificial Sequence
  Cyclic GFR-binding peptide
DDSSNVPEKMNAISVLYFDDSSNAAAAAA

SEQ ID NO: 5325 - protein, 27 aa, Artificial Sequence
  Cyclic GFR-binding peptide
DDSSNVPTKLNAISVLYFDDSSNGGGG

SEQ ID NO: 5326 - protein, 29 aa, Artificial Sequence
  Cyclic GFR-binding peptide
DDSSNTPTKMNAISVLYFDDSSNGGGGGG

SEQ ID NO: 5327 - protein, 27 aa, Artificial Sequence
  Cyclic GFR-binding peptide
DSSNNVPARLNAISVLYFDSSNNAAAA

SEQ ID NO: 5328 - protein, 29 aa, Artificial Sequence
  Cyclic GFR-binding peptide
DDMGVVPTRLNAISVLYFDDMGVAAAAAA

SEQ ID NO: 5329 - protein, 27 aa, Artificial Sequence
  Cyclic GFR-binding peptide
DKGVVAPVKTNAISVLYFDKGVVGGGG

SEQ ID NO: 5330 - protein, 29 aa, Artificial Sequence
  Cyclic GFR-binding peptide
NDKQQVPQALNAISVLYFNDKQQGGGGGG

SEQ ID NO: 5331 - protein, 27 aa, Artificial Sequence
  Cyclic GFR-binding peptide
DAANNVSQDLNAISVLYFDAANNAAAA

SEQ ID NO: 5332 - protein, 29 aa, Artificial Sequence
  Cyclic GFR-binding peptide
DSANNVPQDLNAISVLYFDSANNAAAAAA

SEQ ID NO: 5333 - protein, 27 aa, Artificial Sequence
  Cyclic GFR-binding peptide
DDSSNVPTEENAISVLYFDDSSNGGGG

SEQ ID NO: 5334 - protein, 29 aa, Artificial Sequence
  Cyclic GFR-binding peptide
DNGRVVPTGQNAISVLYFDNGRVGGGGGG

SEQ ID NO: 5335 - protein, 27 aa, Artificial Sequence
  Cyclic GFR-binding peptide
VGRKPSRVHHNAISVLYFVGRKPAAAA

SEQ ID NO: 5336 - protein, 29 aa, Artificial Sequence
  Cyclic GFR-binding peptide
IGKTPTQVQLNAISVLYFIGKTPAAAAAA

SEQ ID NO: 5337 - protein, 27 aa, Artificial Sequence
  Cyclic GFR-binding peptide
VGRTPAPTELSATSVLYYVGRTPGGGG

SEQ ID NO: 5338 - protein, 29 aa, Artificial Sequence
  Cyclic GFR-binding peptide
RIKPHAPTKMSATSVLYYRIKPHGGGGGG

SEQ ID NO: 5339 - protein, 27 aa, Artificial Sequence
  Cyclic GFR-binding peptide
RIKPHAPTKLSATSVLYYRIKPHAAAA

SEQ ID NO: 5340 - protein, 29 aa, Artificial Sequence
  Cyclic GFR-binding peptide
RIKPHAPTQLSATSVLYYRIKPHAAAAAA

SEQ ID NO: 5341 - protein, 27 aa, Artificial Sequence
  Cyclic GFR-binding peptide
RIKPHAPTRLSATSVLYYRIKPHGGGG

SEQ ID NO: 5342 - protein, 29 aa, Artificial Sequence
  Cyclic GFR-binding peptide
EYVRKAPTKTSATSVLYYEYVRKGGGGGG

SEQ ID NO: 5343 - protein, 27 aa, Artificial Sequence
  Cyclic GFR-binding peptide
EIVRKAPTALSATSVLYYEIVRKAAAA

SEQ ID NO: 5344 - protein, 27 aa, Artificial Sequence
  Cyclic GFR-binding peptide
DENEKAPTDLSATSVLYYDENEKGGGG

SEQ ID NO: 5345 - protein, 29 aa, Artificial Sequence
  Cyclic GFR-binding peptide
DENKNVPTELSATSVLYYDENKNGGGGGG

SEQ ID NO: 5346 - protein, 27 aa, Artificial Sequence
  Cyclic GFR-binding peptide
DEYDKVPEKMSATSVLYYDEYDKAAAA

SEQ ID NO: 5347 - protein, 29 aa, Artificial Sequence
  Cyclic GFR-binding peptide
DDSSNVPTKLSATSVLYYDDSSNAAAAAA

SEQ ID NO: 5348 - protein, 27 aa, Artificial Sequence
  Cyclic GFR-binding peptide
DDSSNTPTKMSATSVLYYDDSSNGGGG

SEQ ID NO: 5349 - protein, 29 aa, Artificial Sequence
  Cyclic GFR-binding peptide
DDSSNVPARLSATSVLYYDDSSNGGGGGG

SEQ ID NO: 5350 - protein, 27 aa, Artificial Sequence
  Cyclic GFR-binding peptide
DSSNNVPTRLSATSVLYYDSSNNAAAA

SEQ ID NO: 5351 - protein, 29 aa, Artificial Sequence
  Cyclic GFR-binding peptide
DDMGVAPVKTSATSVLYYDDMGVAAAAAA

SEQ ID NO: 5352 - protein, 27 aa, Artificial Sequence
  Cyclic GFR-binding peptide
DKGVVVPQALSATSVLYYDKGVVGGGG

SEQ ID NO: 5353 - protein, 29 aa, Artificial Sequence
  Cyclic GFR-binding peptide
NDKQQVSQDLSATSVLYYNDKQQGGGGGG

SEQ ID NO: 5354 - protein, 27 aa, Artificial Sequence
  Cyclic GFR-binding peptide
DAANNVPQDLSATSVLYYDAANNAAAA

SEQ ID NO: 5355 - protein, 29 aa, Artificial Sequence
  Cyclic GFR-binding peptide
DSANNVPTEESATSVLYYDSANNAAAAAA

SEQ ID NO: 5356 - protein, 27 aa, Artificial Sequence
  Cyclic GFR-binding peptide
DDSSNVPTGQSATSVLYYDDSSNGGGG

SEQ ID NO: 5357 - protein, 29 aa, Artificial Sequence
  Cyclic GFR-binding peptide
DNGRVSRVHHSATSVLYYDNGRVGGGGGG

SEQ ID NO: 5358 - protein, 27 aa, Artificial Sequence
  Cyclic GFR-binding peptide
VGRKPTQVQLSATSVLYYVGRKPAAAA

SEQ ID NO: 5359 - protein, 29 aa, Artificial Sequence
  Cyclic GFR-binding peptide
IGKTPVPTELSPISVLYKIGKTPAAAAAA

SEQ ID NO: 5360 - protein, 27 aa, Artificial Sequence
  Cyclic GFR-binding peptide
VGRTPVPTKMSPISVLYKVGRTPGGGG

SEQ ID NO: 5361 - protein, 29 aa, Artificial Sequence
  Cyclic GFR-binding peptide
RIKPHVPTKLSPISVLYKRIKPHGGGGGG

SEQ ID NO: 5362 - protein, 27 aa, Artificial Sequence
  Cyclic GFR-binding peptide
RIKPHVPTQLSPISVLYKRIKPHAAAA

SEQ ID NO: 5363 - protein, 29 aa, Artificial Sequence
  Cyclic GFR-binding peptide
RIKPHVPTRLSPISVLYKRIKPHAAAAAA

SEQ ID NO: 5364 - protein, 27 aa, Artificial Sequence
  Cyclic GFR-binding peptide
RIKPHVPTKTSPISVLYKRIKPHGGGG

SEQ ID NO: 5365 - protein, 29 aa, Artificial Sequence
  Cyclic GFR-binding peptide
EYVRKVPTALSPISVLYKEYVRKGGGGGG

SEQ ID NO: 5366 - protein, 27 aa, Artificial Sequence
  Cyclic GFR-binding peptide
EIVRKVPTDLSPISVLYKEIVRKAAAA

SEQ ID NO: 5367 - protein, 27 aa, Artificial Sequence
  Cyclic GFR-binding peptide
DENEKVPEKMSPISVLYKDENEKGGGG

SEQ ID NO: 5368 - protein, 29 aa, Artificial Sequence
  Cyclic GFR-binding peptide
DENKNAPTKLSPISVLYKDENKNGGGGGG

SEQ ID NO: 5369 - protein, 27 aa, Artificial Sequence
  Cyclic GFR-binding peptide
DEYDKAPTQLSPISVLYKDEYDKAAAA

SEQ ID NO: 5370 - protein, 29 aa, Artificial Sequence
  Cyclic GFR-binding peptide
DDSSNTPTKMSPISVLYKDDSSNAAAAAA

SEQ ID NO: 5371 - protein, 27 aa, Artificial Sequence
  Cyclic GFR-binding peptide
DDSSNVPARLSPISVLYKDDSSNGGGG

SEQ ID NO: 5372 - protein, 29 aa, Artificial Sequence
  Cyclic GFR-binding peptide
DDSSNAPVKTSPISVLYKDDSSNGGGGGG

SEQ ID NO: 5373 - protein, 27 aa, Artificial Sequence
  Cyclic GFR-binding peptide
DSSNNVPQALSPISVLYKDSSNNAAAA

SEQ ID NO: 5374 - protein, 29 aa, Artificial Sequence
  Cyclic GFR-binding peptide
DDMGVVSQDLSPISVLYKDDMGVAAAAAA

SEQ ID NO: 5375 - protein, 27 aa, Artificial Sequence
  Cyclic GFR-binding peptide
DKGVVVPQDLSPISVLYKDKGVVGGGG

SEQ ID NO: 5376 - protein, 29 aa, Artificial Sequence
  Cyclic GFR-binding peptide
NDKQQSRVHHSPISVLYKNDKQQGGGGGG

SEQ ID NO: 5377 - protein, 27 aa, Artificial Sequence
  Cyclic GFR-binding peptide
DAANNTQVQLSPISVLYKDAANNAAAA

SEQ ID NO: 5378 - protein, 29 aa, Artificial Sequence
  Cyclic GFR-binding peptide
DSANNVPTELEPISILYLDSANNAAAAAA

SEQ ID NO: 5379 - protein, 27 aa, Artificial Sequence
  Cyclic GFR-binding peptide
DDSSNVPTKMEPISILYLDDSSNGGGG

SEQ ID NO: 5380 - protein, 29 aa, Artificial Sequence
  Cyclic GFR-binding peptide
DNGRVVPTKLEPISILYLDNGRVGGGGGG

SEQ ID NO: 5381 - protein, 27 aa, Artificial Sequence
  Cyclic GFR-binding peptide
VGRKPVPTQLEPISILYLVGRKPAAAA

SEQ ID NO: 5382 - protein, 29 aa, Artificial Sequence
  Cyclic GFR-binding peptide
IGKTPVPTRLEPISILYLIGKTPAAAAAA

SEQ ID NO: 5383 - protein, 27 aa, Artificial Sequence
  Cyclic GFR-binding peptide
VGRTPVPTKTEPISILYLVGRTPGGGG

SEQ ID NO: 5384 - protein, 29 aa, Artificial Sequence
  Cyclic GFR-binding peptide
RIKPHVPTALEPISILYLRIKPHGGGGGG

SEQ ID NO: 5385 - protein, 27 aa, Artificial Sequence
  Cyclic GFR-binding peptide
RIKPHVPTDLEPISILYLRIKPHAAAA

SEQ ID NO: 5386 - protein, 29 aa, Artificial Sequence
  Cyclic GFR-binding peptide
RIKPHVPEKMEPISILYLRIKPHAAAAAA

SEQ ID NO: 5387 - protein, 27 aa, Artificial Sequence
  Cyclic GFR-binding peptide
RIKPHAPTKLEPISILYLRIKPHGGGG

SEQ ID NO: 5388 - protein, 29 aa, Artificial Sequence
  Cyclic GFR-binding peptide
EYVRKAPTQLEPISILYLEYVRKGGGGGG

SEQ ID NO: 5389 - protein, 27 aa, Artificial Sequence
  Cyclic GFR-binding peptide
EIVRKTPTKMEPISILYLEIVRKAAAA

SEQ ID NO: 5390 - protein, 27 aa, Artificial Sequence
  Cyclic GFR-binding peptide
DENEKVPARLEPISILYLDENEKGGGG

SEQ ID NO: 5391 - protein, 29 aa, Artificial Sequence
  Cyclic GFR-binding peptide
DENKNAPVKTEPISILYLDENKNGGGGGG

SEQ ID NO: 5392 - protein, 27 aa, Artificial Sequence
  Cyclic GFR-binding peptide
DEYDKVPQALEPISILYLDEYDKAAAA

SEQ ID NO: 5393 - protein, 29 aa, Artificial Sequence
  Cyclic GFR-binding peptide
DDSSNVSQDLEPISILYLDDSSNAAAAAA

SEQ ID NO: 5394 - protein, 27 aa, Artificial Sequence
  Cyclic GFR-binding peptide
DDSSNVPQDLEPISILYLDDSSNGGGG

SEQ ID NO: 5395 - protein, 29 aa, Artificial Sequence
  Cyclic GFR-binding peptide
DDSSNSRVHHEPISILYLDDSSNGGGGGG

SEQ ID NO: 5396 - protein, 27 aa, Artificial Sequence
  Cyclic GFR-binding peptide
DSSNNTQVQLEPISILYLDSSNNAAAA

SEQ ID NO: 5397 - protein, 29 aa, Artificial Sequence
  Cyclic GFR-binding peptide
DDMGVTPTELSPINMLYFDDMGVAAAAAA

SEQ ID NO: 5398 - protein, 27 aa, Artificial Sequence
  Cyclic GFR-binding peptide
DKGVVTPTKMSPINMLYFDKGVVGGGG

SEQ ID NO: 5399 - protein, 29 aa, Artificial Sequence
  Cyclic GFR-binding peptide
NDKQQTPTKLSPINMLYFNDKQQGGGGGG

SEQ ID NO: 5400 - protein, 27 aa, Artificial Sequence
  Cyclic GFR-binding peptide
DAANNTPTQLSPINMLYFDAANNAAAA

SEQ ID NO: 5401 - protein, 29 aa, Artificial Sequence
  Cyclic GFR-binding peptide
DSANNTPTRLSPINMLYFDSANNAAAAAA

SEQ ID NO: 5402 - protein, 27 aa, Artificial Sequence
  Cyclic GFR-binding peptide
DDSSNTPTKTSPINMLYFDDSSNGGGG

SEQ ID NO: 5403 - protein, 29 aa, Artificial Sequence
  Cyclic GFR-binding peptide
DNGRVTPTALSPINMLYFDNGRVGGGGGG

SEQ ID NO: 5404 - protein, 27 aa, Artificial Sequence
  Cyclic GFR-binding peptide
VGRKPTPTDLSPINMLYFVGRKPAAAA

SEQ ID NO: 5405 - protein, 29 aa, Artificial Sequence
  Cyclic GFR-binding peptide
IGKTPVPTELSPINMLYFIGKTPAAAAAA

SEQ ID NO: 5406 - protein, 27 aa, Artificial Sequence
  Cyclic GFR-binding peptide
VGRTPVPEKMSPINMLYFVGRTPGGGG

SEQ ID NO: 5407 - protein, 29 aa, Artificial Sequence
  Cyclic GFR-binding peptide
RIKPHAPTKLSPINMLYFRIKPHGGGGGG

SEQ ID NO: 5408 - protein, 27 aa, Artificial Sequence
  Cyclic GFR-binding peptide
RIKPHAPTQLSPINMLYFRIKPHAAAA

SEQ ID NO: 5409 - protein, 29 aa, Artificial Sequence
  Cyclic GFR-binding peptide
RIKPHVPTKLSPINMLYFRIKPHAAAAAA

SEQ ID NO: 5410 - protein, 27 aa, Artificial Sequence
  Cyclic GFR-binding peptide
RIKPHVPARLSPINMLYFRIKPHGGGG

SEQ ID NO: 5411 - protein, 29 aa, Artificial Sequence
  Cyclic GFR-binding peptide
EYVRKVPTRLSPINMLYFEYVRKGGGGGG

SEQ ID NO: 5412 - protein, 27 aa, Artificial Sequence
  Cyclic GFR-binding peptide
EIVRKAPVKTSPINMLYFEIVRKAAAA

SEQ ID NO: 5413 - protein, 27 aa, Artificial Sequence
  Cyclic GFR-binding peptide
DENEKVPQALSPINMLYFDENEKGGGG

SEQ ID NO: 5414 - protein, 29 aa, Artificial Sequence
  Cyclic GFR-binding peptide
DENKNVSQDLSPINMLYFDENKNGGGGGG

SEQ ID NO: 5415 - protein, 27 aa, Artificial Sequence
  Cyclic GFR-binding peptide
DEYDKVPQDLSPINMLYFDEYDKAAAA

SEQ ID NO: 5416 - protein, 29 aa, Artificial Sequence
  Cyclic GFR-binding peptide
DDSSNVPTEESPINMLYFDDSSNAAAAAA

SEQ ID NO: 5417 - protein, 27 aa, Artificial Sequence
  Cyclic GFR-binding peptide
DDSSNVPTGQSPINMLYFDDSSNGGGG

SEQ ID NO: 5418 - protein, 29 aa, Artificial Sequence
  Cyclic GFR-binding peptide
DDSSNSRVHHSPINMLYFDDSSNGGGGGG

SEQ ID NO: 5419 - protein, 27 aa, Artificial Sequence
  Cyclic GFR-binding peptide
DSSNNTQVQLSPINMLYFDSSNNAAAA

SEQ ID NO: 5420 - protein, 29 aa, Artificial Sequence
  Cyclic GFR-binding peptide
DDMGVVPAELSPISILYIDDMGVAAAAAA

SEQ ID NO: 5421 - protein, 27 aa, Artificial Sequence
  Cyclic GFR-binding peptide
DKGVVVPAKMSPISILYIDKGVVGGGG

SEQ ID NO: 5422 - protein, 29 aa, Artificial Sequence
  Cyclic GFR-binding peptide
NDKQQVPAKLSPISILYINDKQQGGGGGG

SEQ ID NO: 5423 - protein, 27 aa, Artificial Sequence
  Cyclic GFR-binding peptide
DAANNVPAQLSPISILYIDAANNAAAA

SEQ ID NO: 5424 - protein, 29 aa, Artificial Sequence
  Cyclic GFR-binding peptide
DSANNVPARLSPISILYIDSANNAAAAAA

SEQ ID NO: 5425 - protein, 27 aa, Artificial Sequence
  Cyclic GFR-binding peptide
DDSSNVPAKTSPISILYIDDSSNGGGG

SEQ ID NO: 5426 - protein, 29 aa, Artificial Sequence
  Cyclic GFR-binding peptide
DNGRVVPAALSPISILYIDNGRVGGGGGG

SEQ ID NO: 5427 - protein, 27 aa, Artificial Sequence
  Cyclic GFR-binding peptide
VGRKPVPADLSPISILYIVGRKPAAAA

SEQ ID NO: 5428 - protein, 29 aa, Artificial Sequence
  Cyclic GFR-binding peptide
IGKTPVPTELSPISILYIIGKTPAAAAAA

SEQ ID NO: 5429 - protein, 27 aa, Artificial Sequence
  Cyclic GFR-binding peptide
VGRTPVPEKMSPISILYIVGRTPGGGG

SEQ ID NO: 5430 - protein, 29 aa, Artificial Sequence
  Cyclic GFR-binding peptide
RIKPHAPTKLSPISILYIRIKPHGGGGGG

SEQ ID NO: 5431 - protein, 27 aa, Artificial Sequence
  Cyclic GFR-binding peptide
RIKPHAPTQLSPISILYIRIKPHAAAA

SEQ ID NO: 5432 - protein, 29 aa, Artificial Sequence
  Cyclic GFR-binding peptide
RIKPHVPTKLSPISILYIRIKPHAAAAAA

SEQ ID NO: 5433 - protein, 27 aa, Artificial Sequence
  Cyclic GFR-binding peptide
RIKPHTPTKMSPISILYIRIKPHGGGG

SEQ ID NO: 5434 - protein, 29 aa, Artificial Sequence
  Cyclic GFR-binding peptide
EYVRKVPTRLSPISILYIEYVRKGGGGGG

SEQ ID NO: 5435 - protein, 27 aa, Artificial Sequence
  Cyclic GFR-binding peptide
EIVRKAPVKTSPISILYIEIVRKAAAA

SEQ ID NO: 5436 - protein, 27 aa, Artificial Sequence
  Cyclic GFR-binding peptide
DENEKVPQALSPISILYIDENEKGGGG

SEQ ID NO: 5437 - protein, 29 aa, Artificial Sequence
  Cyclic GFR-binding peptide
DENKNVSQDLSPISILYIDENKNGGGGGG

SEQ ID NO: 5438 - protein, 27 aa, Artificial Sequence
  Cyclic GFR-binding peptide
DEYDKVPQDLSPISILYIDEYDKAAAA

SEQ ID NO: 5439 - protein, 29 aa, Artificial Sequence
  Cyclic GFR-binding peptide
DDSSNVPTEESPISILYIDDSSNAAAAAA

SEQ ID NO: 5440 - protein, 27 aa, Artificial Sequence
  Cyclic GFR-binding peptide
DDSSNVPTGQSPISILYIDDSSNGGGG

SEQ ID NO: 5441 - protein, 29 aa, Artificial Sequence
  Cyclic GFR-binding peptide
DDSSNSRVHHSPISILYIDDSSNGGGGGG

SEQ ID NO: 5442 - protein, 27 aa, Artificial Sequence
  Cyclic GFR-binding peptide
DSSNNTQVQLSPISILYIDSSNNAAAA

SEQ ID NO: 5443 - protein, 29 aa, Artificial Sequence
  Cyclic GFR-binding peptide
DDMGVVPTELSPISILFIDDMGVAAAAAA

SEQ ID NO: 5444 - protein, 27 aa, Artificial Sequence
  Cyclic GFR-binding peptide
DKGVVVPTKMSPISILFIDKGVVGGGG

SEQ ID NO: 5445 - protein, 29 aa, Artificial Sequence
  Cyclic GFR-binding peptide
NDKQQVPTKLSPISILFINDKQQGGGGGG

SEQ ID NO: 5446 - protein, 27 aa, Artificial Sequence
  Cyclic GFR-binding peptide
DAANNVPTQLSPISILFIDAANNAAAA

SEQ ID NO: 5447 - protein, 29 aa, Artificial Sequence
  Cyclic GFR-binding peptide
DSANNVPTRLSPISILFIDSANNAAAAAA

SEQ ID NO: 5448 - protein, 27 aa, Artificial Sequence
  Cyclic GFR-binding peptide
DDSSNVPTKTSPISILFIDDSSNGGGG

SEQ ID NO: 5449 - protein, 29 aa, Artificial Sequence
  Cyclic GFR-binding peptide
DNGRVVPTALSPISILFIDNGRVGGGGGG

SEQ ID NO: 5450 - protein, 27 aa, Artificial Sequence
  Cyclic GFR-binding peptide
VGRKPVPTDLSPISILFIVGRKPAAAA

SEQ ID NO: 5451 - protein, 29 aa, Artificial Sequence
  Cyclic GFR-binding peptide
IGKTPVPEKMSPISILFIIGKTPAAAAAA

SEQ ID NO: 5452 - protein, 27 aa, Artificial Sequence
  Cyclic GFR-binding peptide
VGRTPAPTKLSPISILFIVGRTPGGGG

SEQ ID NO: 5453 - protein, 29 aa, Artificial Sequence
  Cyclic GFR-binding peptide
RIKPHAPTQLSPISILFIRIKPHGGGGGG

SEQ ID NO: 5454 - protein, 27 aa, Artificial Sequence
  Cyclic GFR-binding peptide
RIKPHTPTKMSPISILFIRIKPHAAAA

SEQ ID NO: 5455 - protein, 29 aa, Artificial Sequence
  Cyclic GFR-binding peptide
RIKPHVPARLSPISILFIRIKPHAAAAAA

SEQ ID NO: 5456 - protein, 27 aa, Artificial Sequence
  Cyclic GFR-binding peptide
RIKPHAPVKTSPISILFIRIKPHGGGG

SEQ ID NO: 5457 - protein, 29 aa, Artificial Sequence
  Cyclic GFR-binding peptide
EYVRKVPQALSPISILFIEYVRKGGGGGG

SEQ ID NO: 5458 - protein, 27 aa, Artificial Sequence
  Cyclic GFR-binding peptide
EIVRKVSQDLSPISILFIEIVRKAAAA

SEQ ID NO: 5459 - protein, 27 aa, Artificial Sequence
  Cyclic GFR-binding peptide
DENEKVPQDLSPISILFIDENEKGGGG

SEQ ID NO: 5460 - protein, 29 aa, Artificial Sequence
  Cyclic GFR-binding peptide
DENKNSRVHHSPISILFIDENKNGGGGGG

SEQ ID NO: 5461 - protein, 27 aa, Artificial Sequence
  Cyclic GFR-binding peptide
DEYDKTQVQLSPISILFIDEYDKAAAA

SEQ ID NO: 5462 - protein, 29 aa, Artificial Sequence
  Cyclic GFR-binding peptide
DDSSNAPVELKPLSMLYVDDSSNAAAAAA

SEQ ID NO: 5463 - protein, 27 aa, Artificial Sequence
  Cyclic GFR-binding peptide
DDSSNAPVKMKPLSMLYVDDSSNGGGG

SEQ ID NO: 5464 - protein, 29 aa, Artificial Sequence
  Cyclic GFR-binding peptide
DDSSNAPVKLKPLSMLYVDDSSNGGGGGG

SEQ ID NO: 5465 - protein, 27 aa, Artificial Sequence
  Cyclic GFR-binding peptide
DSSNNAPVQLKPLSMLYVDSSNNAAAA

SEQ ID NO: 5466 - protein, 29 aa, Artificial Sequence
  Cyclic GFR-binding peptide
DDMGVAPVRLKPLSMLYVDDMGVAAAAAA

SEQ ID NO: 5467 - protein, 27 aa, Artificial Sequence
  Cyclic GFR-binding peptide
DKGVVAPVALKPLSMLYVDKGVVGGGG

SEQ ID NO: 5468 - protein, 29 aa, Artificial Sequence
  Cyclic GFR-binding peptide
NDKQQAPVDLKPLSMLYVNDKQQGGGGGG

SEQ ID NO: 5469 - protein, 27 aa, Artificial Sequence
  Cyclic GFR-binding peptide
DAANNVPTELKPLSMLYVDAANNAAAA

SEQ ID NO: 5470 - protein, 29 aa, Artificial Sequence
  Cyclic GFR-binding peptide
DSANNVPEKMKPLSMLYVDSANNAAAAAA

SEQ ID NO: 5471 - protein, 27 aa, Artificial Sequence
  Cyclic GFR-binding peptide
DDSSNAPTKLKPLSMLYVDDSSNGGGG

SEQ ID NO: 5472 - protein, 29 aa, Artificial Sequence
  Cyclic GFR-binding peptide
DNGRVAPTQLKPLSMLYVDNGRVGGGGGG

SEQ ID NO: 5473 - protein, 27 aa, Artificial Sequence
  Cyclic GFR-binding peptide
VGRKPVPTKLKPLSMLYVVGRKPAAAA

SEQ ID NO: 5474 - protein, 29 aa, Artificial Sequence
  Cyclic GFR-binding peptide
IGKTPTPTKMKPLSMLYVIGKTPAAAAAA

SEQ ID NO: 5475 - protein, 27 aa, Artificial Sequence
  Cyclic GFR-binding peptide
DENEKVPARLKPLSMLYVVGRTPGGGG

SEQ ID NO: 5476 - protein, 29 aa, Artificial Sequence
  Cyclic GFR-binding peptide
DENKNVPTRLKPLSMLYVRIKPHGGGGGG

SEQ ID NO: 5477 - protein, 27 aa, Artificial Sequence
  Cyclic GFR-binding peptide
DEYDKVPQALKPLSMLYVRIKPHAAAA

SEQ ID NO: 5478 - protein, 29 aa, Artificial Sequence
  Cyclic GFR-binding peptide
DDSSNVSQDLKPLSMLYVRIKPHAAAAAA

SEQ ID NO: 5479 - protein, 27 aa, Artificial Sequence
  Cyclic GFR-binding peptide
DDSSNVPQDLKPLSMLYVRIKPHGGGG

SEQ ID NO: 5480 - protein, 29 aa, Artificial Sequence
  Cyclic GFR-binding peptide
DDSSNVPTEEKPLSMLYVEYVRKGGGGGG

SEQ ID NO: 5481 - protein, 27 aa, Artificial Sequence
  Cyclic GFR-binding peptide
DSSNNVPTGQKPLSMLYVEIVRKAAAA

SEQ ID NO: 5482 - protein, 27 aa, Artificial Sequence
  Cyclic GFR-binding peptide
DDMGVSRVHHKPLSMLYVDENEKGGGG

SEQ ID NO: 5483 - protein, 29 aa, Artificial Sequence
  Cyclic GFR-binding peptide
DKGVVTQVQLKPLSMLYVDENKNGGGGGG

SEQ ID NO: 5484 - protein, 27 aa, Artificial Sequence
  Cyclic GFR-binding peptide
NDKQQVPQELEPLPIVYYDEYDKAAAA

SEQ ID NO: 5485 - protein, 29 aa, Artificial Sequence
  Cyclic GFR-binding peptide
DAANNVPQKMEPLPIVYYDDSSNAAAAAA

SEQ ID NO: 5486 - protein, 27 aa, Artificial Sequence
  Cyclic GFR-binding peptide
DSANNVPQKLEPLPIVYYDDSSNGGGG

SEQ ID NO: 5487 - protein, 29 aa, Artificial Sequence
  Cyclic GFR-binding peptide
DDSSNVPQQLEPLPIVYYDDSSNGGGGGG

SEQ ID NO: 5488 - protein, 27 aa, Artificial Sequence
  Cyclic GFR-binding peptide
DNGRVVPQRLEPLPIVYYDSSNNAAAA

SEQ ID NO: 5489 - protein, 29 aa, Artificial Sequence
  Cyclic GFR-binding peptide
VGRKPVPQKTEPLPIVYYDDMGVAAAAAA

SEQ ID NO: 5490 - protein, 27 aa, Artificial Sequence
  Cyclic GFR-binding peptide
IGKTPVPQDLEPLPIVYYDKGVVGGGG

SEQ ID NO: 5491 - protein, 29 aa, Artificial Sequence
  Cyclic GFR-binding peptide
VGRTPVPTELEPLPIVYYNDKQQGGGGGG

SEQ ID NO: 5492 - protein, 27 aa, Artificial Sequence
  Cyclic GFR-binding peptide
RIKPHVPEKMEPLPIVYYDAANNAAAA

SEQ ID NO: 5493 - protein, 29 aa, Artificial Sequence
  Cyclic GFR-binding peptide
RIKPHAPTKLEPLPIVYYDSANNAAAAAA

SEQ ID NO: 5494 - protein, 27 aa, Artificial Sequence
  Cyclic GFR-binding peptide
RIKPHAPTQLEPLPIVYYDDSSNGGGG

SEQ ID NO: 5495 - protein, 29 aa, Artificial Sequence
  Cyclic GFR-binding peptide
RIKPHVPTKLEPLPIVYYDNGRVGGGGGG

SEQ ID NO: 5496 - protein, 27 aa, Artificial Sequence
  Cyclic GFR-binding peptide
EYVRKTPTKMEPLPIVYYVGRKPAAAA

SEQ ID NO: 5497 - protein, 29 aa, Artificial Sequence
  Cyclic GFR-binding peptide
EIVRKVPARLEPLPIVYYIGKTPAAAAAA

SEQ ID NO: 5498 - protein, 27 aa, Artificial Sequence
  Cyclic GFR-binding peptide
DENEKVPTRLEPLPIVYYVGRTPGGGG

SEQ ID NO: 5499 - protein, 29 aa, Artificial Sequence
  Cyclic GFR-binding peptide
DENKNAPVKTEPLPIVYYRIKPHGGGGGG

SEQ ID NO: 5500 - protein, 27 aa, Artificial Sequence
  Cyclic GFR-binding peptide
DEYDKVSQDLEPLPIVYYRIKPHAAAA

SEQ ID NO: 5501 - protein, 29 aa, Artificial Sequence
  Cyclic GFR-binding peptide
DDSSNVPTEEEPLPIVYYRIKPHAAAAAA

SEQ ID NO: 5502 - protein, 27 aa, Artificial Sequence
  Cyclic GFR-binding peptide
DDSSNVPTGQEPLPIVYYRIKPHGGGG

SEQ ID NO: 5503 - protein, 29 aa, Artificial Sequence
  Cyclic GFR-binding peptide
DDSSNSRVHHEPLPIVYYEYVRKGGGGGG

SEQ ID NO: 5504 - protein, 27 aa, Artificial Sequence
  Cyclic GFR-binding peptide
DSSNNTQVQLEPLPIVYYEIVRKAAAA

SEQ ID NO: 5505 - protein, 27 aa, Artificial Sequence
  Cyclic GFR-binding peptide
DDMGVVSQELEPLTILYYDENEKGGGG

SEQ ID NO: 5506 - protein, 29 aa, Artificial Sequence
  Cyclic GFR-binding peptide
DKGVVVSQKMEPLTILYYDENKNGGGGGG

SEQ ID NO: 5507 - protein, 27 aa, Artificial Sequence
  Cyclic GFR-binding peptide
NDKQQVSQKLEPLTILYYDEYDKAAAA

SEQ ID NO: 5508 - protein, 29 aa, Artificial Sequence
  Cyclic GFR-binding peptide
DAANNVSQQLEPLTILYYDDSSNAAAAAA

SEQ ID NO: 5509 - protein, 27 aa, Artificial Sequence
  Cyclic GFR-binding peptide
DSANNVSQRLEPLTILYYDDSSNGGGG

SEQ ID NO: 5510 - protein, 29 aa, Artificial Sequence
  Cyclic GFR-binding peptide
DDSSNVSQKTEPLTILYYDDSSNGGGGGG

SEQ ID NO: 5511 - protein, 27 aa, Artificial Sequence
  Cyclic GFR-binding peptide
DNGRVVSQALEPLTILYYDSSNNAAAA

SEQ ID NO: 5512 - protein, 29 aa, Artificial Sequence
  Cyclic GFR-binding peptide
VGRKPVSQDLEPLTILYYDDMGVAAAAAA

SEQ ID NO: 5513 - protein, 27 aa, Artificial Sequence
  Cyclic GFR-binding peptide
IGKTPVPTELEPLTILYYDKGVVGGGG

SEQ ID NO: 5514 - protein, 29 aa, Artificial Sequence
  Cyclic GFR-binding peptide
VGRTPVPEKMEPLTILYYNDKQQGGGGGG

SEQ ID NO: 5515 - protein, 27 aa, Artificial Sequence
  Cyclic GFR-binding peptide
RIKPHAPTKLEPLTILYYDAANNAAAA

SEQ ID NO: 5516 - protein, 29 aa, Artificial Sequence
  Cyclic GFR-binding peptide
RIKPHAPTQLEPLTILYYDSANNAAAAAA

SEQ ID NO: 5517 - protein, 27 aa, Artificial Sequence
  Cyclic GFR-binding peptide
RIKPHVPTKLEPLTILYYDDSSNGGGG

SEQ ID NO: 5518 - protein, 29 aa, Artificial Sequence
  Cyclic GFR-binding peptide
RIKPHTPTKMEPLTILYYDNGRVGGGGGG

SEQ ID NO: 5519 - protein, 27 aa, Artificial Sequence
  Cyclic GFR-binding peptide
EYVRKVPARLEPLTILYYVGRKPAAAA

SEQ ID NO: 5520 - protein, 29 aa, Artificial Sequence
  Cyclic GFR-binding peptide
EIVRKVPTRLEPLTILYYIGKTPAAAAAA

SEQ ID NO: 5521 - protein, 27 aa, Artificial Sequence
  Cyclic GFR-binding peptide
DENEKAPVKTEPLTILYYVGRTPGGGG

SEQ ID NO: 5522 - protein, 29 aa, Artificial Sequence
  Cyclic GFR-binding peptide
DENKNVPQALEPLTILYYRIKPHGGGGGG

SEQ ID NO: 5523 - protein, 27 aa, Artificial Sequence
  Cyclic GFR-binding peptide
DEYDKVPTEEEPLTILYYRIKPHAAAA

SEQ ID NO: 5524 - protein, 29 aa, Artificial Sequence
  Cyclic GFR-binding peptide
DDSSNVPTGQEPLTILYYRIKPHAAAAAA

SEQ ID NO: 5525 - protein, 27 aa, Artificial Sequence
  Cyclic GFR-binding peptide
DDSSNSRVHHEPLTILYYRIKPHGGGG

SEQ ID NO: 5526 - protein, 29 aa, Artificial Sequence
  Cyclic GFR-binding peptide
DDSSNTQVQLEPLTILYYEYVRKGGGGGG

SEQ ID NO: 5527 - protein, 27 aa, Artificial Sequence
  Cyclic GFR-binding peptide
DSSNNVPQELEPLTILYYEIVRKAAAA

SEQ ID NO: 5528 - protein, 27 aa, Artificial Sequence
  Cyclic GFR-binding peptide
DDMGVVPQKMEPLTILYYDENEKGGGG

SEQ ID NO: 5529 - protein, 29 aa, Artificial Sequence
  Cyclic GFR-binding peptide
DKGVVVPQKLEPLTILYYDENKNGGGGGG

SEQ ID NO: 5530 - protein, 27 aa, Artificial Sequence
  Cyclic GFR-binding peptide
NDKQQVPQQLEPLTILYYDEYDKAAAA

SEQ ID NO: 5531 - protein, 29 aa, Artificial Sequence
  Cyclic GFR-binding peptide
DAANNVPQRLEPLTILYYDDSSNAAAAAA

SEQ ID NO: 5532 - protein, 27 aa, Artificial Sequence
  Cyclic GFR-binding peptide
DSANNVPQKTEPLTILYYDDSSNGGGG

SEQ ID NO: 5533 - protein, 29 aa, Artificial Sequence
  Cyclic GFR-binding peptide
DDSSNVPQDLEPLTILYYDDSSNGGGGGG

SEQ ID NO: 5534 - protein, 27 aa, Artificial Sequence
  Cyclic GFR-binding peptide
DNGRVVPTGQSNITMQIMDSSNNAAAA

SEQ ID NO: 5535 - protein, 29 aa, Artificial Sequence
  Cyclic GFR-binding peptide
VGRKPVPEKMSNITMQIMDDMGVAAAAAA

SEQ ID NO: 5536 - protein, 27 aa, Artificial Sequence
  Cyclic GFR-binding peptide
IGKTPAPTKLSNITMQIMDKGVVGGGG

SEQ ID NO: 5537 - protein, 29 aa, Artificial Sequence
  Cyclic GFR-binding peptide
VGRTPAPTQLSNITMQIMNDKQQGGGGGG

SEQ ID NO: 5538 - protein, 27 aa, Artificial Sequence
  Cyclic GFR-binding peptide
RIKPHTPTKMSNITMQIMDAANNAAAA

SEQ ID NO: 5539 - protein, 29 aa, Artificial Sequence
  Cyclic GFR-binding peptide
RIKPHVPARLSNITMQIMDSANNAAAAAA

SEQ ID NO: 5540 - protein, 27 aa, Artificial Sequence
  Cyclic GFR-binding peptide
RIKPHAPVKTSNITMQIMDDSSNGGGG

SEQ ID NO: 5541 - protein, 29 aa, Artificial Sequence
  Cyclic GFR-binding peptide
RIKPHVPQALSNITMQIMDNGRVGGGGGG

SEQ ID NO: 5542 - protein, 27 aa, Artificial Sequence
  Cyclic GFR-binding peptide
EYVRKVSQDLSNITMQIMVGRKPAAAA

SEQ ID NO: 5543 - protein, 29 aa, Artificial Sequence
  Cyclic GFR-binding peptide
EIVRKVPQDLSNITMQIMIGKTPAAAAAA

SEQ ID NO: 5544 - protein, 27 aa, Artificial Sequence
  Cyclic GFR-binding peptide
DENEKSRVHHSNITMQIMVGRTPGGGG

SEQ ID NO: 5545 - protein, 29 aa, Artificial Sequence
  Cyclic GFR-binding peptide
DENKNTQVQLSNITMQIMRIKPHGGGGGG

SEQ ID NO: 5546 - protein, 27 aa, Artificial Sequence
  Cyclic GFR-binding peptide
DEYDKSRVQLRSVKVAKVRIKPHAAAA

SEQ ID NO: 5547 - protein, 29 aa, Artificial Sequence
  Cyclic GFR-binding peptide
DDSSNVPTELRSVKVAKVRIKPHAAAAAA

SEQ ID NO: 5548 - protein, 27 aa, Artificial Sequence
  Cyclic GFR-binding peptide
DDSSNVPEKMRSVKVAKVRIKPHGGGG

SEQ ID NO: 5549 - protein, 29 aa, Artificial Sequence
  Cyclic GFR-binding peptide
DDSSNAPTKLRSVKVAKVEYVRKGGGGGG

SEQ ID NO: 5550 - protein, 27 aa, Artificial Sequence
  Cyclic GFR-binding peptide
DSSNNAPTQLRSVKVAKVEIVRKAAAA

SEQ ID NO: 5551 - protein, 27 aa, Artificial Sequence
  Cyclic GFR-binding peptide
DDMGVVPTKLRSVKVAKVDENEKGGGG

SEQ ID NO: 5552 - protein, 29 aa, Artificial Sequence
  Cyclic GFR-binding peptide
DKGVVTPTKMRSVKVAKVDENKNGGGGGG

SEQ ID NO: 5553 - protein, 27 aa, Artificial Sequence
  Cyclic GFR-binding peptide
NDKQQVPARLRSVKVAKVDEYDKAAAA

SEQ ID NO: 5554 - protein, 29 aa, Artificial Sequence
  Cyclic GFR-binding peptide
DAANNVPTRLRSVKVAKVDDSSNAAAAAA

SEQ ID NO: 5555 - protein, 27 aa, Artificial Sequence
  Cyclic GFR-binding peptide
DSANNAPVKTRSVKVAKVDDSSNGGGG

SEQ ID NO: 5556 - protein, 29 aa, Artificial Sequence
  Cyclic GFR-binding peptide
DDSSNVPQALRSVKVAKVDDSSNGGGGGG

SEQ ID NO: 5557 - protein, 27 aa, Artificial Sequence
  Cyclic GFR-binding peptide
DNGRVVSQDLRSVKVAKVDSSNNAAAA

SEQ ID NO: 5558 - protein, 29 aa, Artificial Sequence
  Cyclic GFR-binding peptide
VGRKPVPQDLRSVKVAKVDDMGVAAAAAA

SEQ ID NO: 5559 - protein, 27 aa, Artificial Sequence
  Cyclic GFR-binding peptide
IGKTPVPTEERSVKVAKVDKGVVGGGG

SEQ ID NO: 5560 - protein, 29 aa, Artificial Sequence
  Cyclic GFR-binding peptide
VGRTPVPTGQRSVKVAKVNDKQQGGGGGG

SEQ ID NO: 5561 - protein, 27 aa, Artificial Sequence
  Cyclic GFR-binding peptide
RIKPHTQVQLRSVKVAKVDAANNAAAA

SEQ ID NO: 5562 - protein, 29 aa, Artificial Sequence
  Cyclic GFR-binding peptide
RIKPHTQVHHRPVQVRKIDSANNAAAAAA

SEQ ID NO: 5563 - protein, 27 aa, Artificial Sequence
  Cyclic GFR-binding peptide
RIKPHVPTELRPVQVRKIDDSSNGGGG

SEQ ID NO: 5564 - protein, 29 aa, Artificial Sequence
  Cyclic GFR-binding peptide
RIKPHVPEKMRPVQVRKIDNGRVGGGGGG

SEQ ID NO: 5565 - protein, 27 aa, Artificial Sequence
  Cyclic GFR-binding peptide
EYVRKAPTKLRPVQVRKIVGRKPAAAA

SEQ ID NO: 5566 - protein, 29 aa, Artificial Sequence
  Cyclic GFR-binding peptide
EIVRKAPTQLRPVQVRKIIGKTPAAAAAA

SEQ ID NO: 5567 - protein, 27 aa, Artificial Sequence
  Cyclic GFR-binding peptide
DENEKVPTKLRPVQVRKIVGRTPGGGG

SEQ ID NO: 5568 - protein, 29 aa, Artificial Sequence
  Cyclic GFR-binding peptide
DENKNTPTKMRPVQVRKIRIKPHGGGGGG

SEQ ID NO: 5569 - protein, 27 aa, Artificial Sequence
  Cyclic GFR-binding peptide
DEYDKVPARLRPVQVRKIRIKPHAAAA

SEQ ID NO: 5570 - protein, 29 aa, Artificial Sequence
  Cyclic GFR-binding peptide
DDSSNVPTRLRPVQVRKIRIKPHAAAAAA

SEQ ID NO: 5571 - protein, 27 aa, Artificial Sequence
  Cyclic GFR-binding peptide
DDSSNAPVKTRPVQVRKIRIKPHGGGG

SEQ ID NO: 5572 - protein, 29 aa, Artificial Sequence
  Cyclic GFR-binding peptide
DDSSNVPQALRPVQVRKIEYVRKGGGGGG

SEQ ID NO: 5573 - protein, 27 aa, Artificial Sequence
  Cyclic GFR-binding peptide
DSSNNVSQDLRPVQVRKIEIVRKAAAA

SEQ ID NO: 5574 - protein, 27 aa, Artificial Sequence
  Cyclic GFR-binding peptide
DDMGVVPQDLRPVQVRKIDENEKGGGG

SEQ ID NO: 5575 - protein, 29 aa, Artificial Sequence
  Cyclic GFR-binding peptide
DKGVVVPTEERPVQVRKIDENKNGGGGGG

SEQ ID NO: 5576 - protein, 27 aa, Artificial Sequence
  Cyclic GFR-binding peptide
NDKQQVPTGQRPVQVRKIDEYDKAAAA

SEQ ID NO: 5577 - protein, 29 aa, Artificial Sequence
  Cyclic GFR-binding peptide
DAANNSRVHHRPVQVRKIDDSSNAAAAAA

SEQ ID NO: 5578 - protein, 27 aa, Artificial Sequence
  Cyclic GFR-binding peptide
GGGGKENEDLYLMSIASMKTPVGWFWW

SEQ ID NO: 5579 - protein, 29 aa, Artificial Sequence
  Cyclic GFR-binding peptide
GGGGGGNKNEDLYLMSIASLKTPVPGPTG

SEQ ID NO: 5580 - protein, 28 aa, Artificial Sequence
  Cyclic GFR-binding peptide
AAAAKDYEDLYLMSIASLQTPVGGWFWW

SEQ ID NO: 5581 - protein, 30 aa, Artificial Sequence
  Cyclic GFR-binding peptide
AAAAAANSSDDLYLMSIASLRTPVGPGPTG

SEQ ID NO: 5582 - protein, 29 aa, Artificial Sequence
  Cyclic GFR-binding peptide
GGGGNSSDDLYLMSIASTKTPVGGGWFWW

SEQ ID NO: 5583 - protein, 31 aa, Artificial Sequence
  Cyclic GFR-binding peptide
GGGGGGNSSDDLYLMSIASLATPVGGPGPTG

SEQ ID NO: 5584 - protein, 30 aa, Artificial Sequence
  Cyclic GFR-binding peptide
AAAANNSSDLYLMSIASLDTPVGGGGWFWW

SEQ ID NO: 5585 - protein, 32 aa, Artificial Sequence
  Cyclic GFR-binding peptide
AAAAAAVGMDDLYLMSIASMKEPVGGGPGPTG

SEQ ID NO: 5586 - protein, 27 aa, Artificial Sequence
  Cyclic GFR-binding peptide
GGGGVVGKDLYLMSIASLKTPAGWFWW

SEQ ID NO: 5587 - protein, 29 aa, Artificial Sequence
  Cyclic GFR-binding peptide
GGGGGGQQKDNLYLMSIASLQTPAPGPTG

SEQ ID NO: 5588 - protein, 28 aa, Artificial Sequence
  Cyclic GFR-binding peptide
AAAANNAADLYLMSIASMKTPTGGWFWW

SEQ ID NO: 5589 - protein, 30 aa, Artificial Sequence
  Cyclic GFR-binding peptide
AAAAAANNASDLYLMSIASLRAPVGPGPTG

SEQ ID NO: 5590 - protein, 29 aa, Artificial Sequence
  Cyclic GFR-binding peptide
GGGGNSSDDLYLMSIASTKVPAGGGWFWW

SEQ ID NO: 5591 - protein, 31 aa, Artificial Sequence
  Cyclic GFR-binding peptide
GGGGGGVRGNDLYLMSIASLAQPVGGPGPTG

SEQ ID NO: 5592 - protein, 30 aa, Artificial Sequence
  Cyclic GFR-binding peptide
AAAAPKRGVLYLMSIASLDQSVGGGGWFWW

SEQ ID NO: 5593 - protein, 32 aa, Artificial Sequence
  Cyclic GFR-binding peptide
AAAAAAPTKGILYLMSIASLDQPVGGGPGPTG

SEQ ID NO: 5594 - protein, 27 aa, Artificial Sequence
  Cyclic GFR-binding peptide
GGGGPTRGVLYLMSIASHHVRSGWFWW

SEQ ID NO: 5595 - protein, 29 aa, Artificial Sequence
  Cyclic GFR-binding peptide
GGGGGGHPKIRLYLMSIASLQVQTPGPTG

SEQ ID NO: 5596 - protein, 28 aa, Artificial Sequence
  Cyclic GFR-binding peptide
AAAAHPKIRFFLISLSSLEEPVGGWFWW

SEQ ID NO: 5597 - protein, 30 aa, Artificial Sequence
  Cyclic GFR-binding peptide
AAAAAAHPKIRFFLISLSSLKEPVGPGPTG

SEQ ID NO: 5598 - protein, 29 aa, Artificial Sequence
  Cyclic GFR-binding peptide
GGGGHPKIRFFLISLSSLQEPVGGGWFWW

SEQ ID NO: 5599 - protein, 31 aa, Artificial Sequence
  Cyclic GFR-binding peptide
GGGGGGKRVYEFFLISLSSMKEPVGGPGPTG

SEQ ID NO: 5600 - protein, 30 aa, Artificial Sequence
  Cyclic GFR-binding peptide
AAAAKRVIEFFLISLSSLREPVGGGGWFWW

SEQ ID NO: 5601 - protein, 30 aa, Artificial Sequence
  Cyclic GFR-binding peptide
GGGGKENEDFFLISLSSTKEPVGGGPGPTG

SEQ ID NO: 5602 - protein, 29 aa, Artificial Sequence
  Cyclic GFR-binding peptide
GGGGGGNKNEDFFLISLSSLAEPVGWFWW

SEQ ID NO: 5603 - protein, 27 aa, Artificial Sequence
  Cyclic GFR-binding peptide
AAAAKDYEDFFLISLSSLDEPVPGPTG

SEQ ID NO: 5604 - protein, 30 aa, Artificial Sequence
  Cyclic GFR-binding peptide
AAAAAANSSDDFFLISLSSLETPVGGWFWW

SEQ ID NO: 5605 - protein, 28 aa, Artificial Sequence
  Cyclic GFR-binding peptide
GGGGNSSDDFFLISLSSLKTPAGPGPTG

SEQ ID NO: 5606 - protein, 31 aa, Artificial Sequence
  Cyclic GFR-binding peptide
GGGGGGNSSDDFFLISLSSLQTPAGGGWFWW

SEQ ID NO: 5607 - protein, 29 aa, Artificial Sequence
  Cyclic GFR-binding peptide
AAAANNSSDFFLISLSSLKTPVGGPGPTG

SEQ ID NO: 5608 - protein, 32 aa, Artificial Sequence
  Cyclic GFR-binding peptide
AAAAAAVGMDDFFLISLSSMKTPTGGGGWFWW

SEQ ID NO: 5609 - protein, 30 aa, Artificial Sequence
  Cyclic GFR-binding peptide
GGGGVVGKDFFLISLSSLRAPVGGGPGPTG

SEQ ID NO: 5610 - protein, 29 aa, Artificial Sequence
  Cyclic GFR-binding peptide
GGGGGGQQKDNFFLISLSSLRTPVGWFWW

SEQ ID NO: 5611 - protein, 27 aa, Artificial Sequence
  Cyclic GFR-binding peptide
AAAANNAADFFLISLSSTKVPAPGPTG

SEQ ID NO: 5612 - protein, 30 aa, Artificial Sequence
  Cyclic GFR-binding peptide
AAAAAANNASDFFLISLSSLAQPVGGWFWW

SEQ ID NO: 5613 - protein, 28 aa, Artificial Sequence
  Cyclic GFR-binding peptide
GGGGNSSDDFFLISLSSLDQSVGPGPTG

SEQ ID NO: 5614 - protein, 31 aa, Artificial Sequence
  Cyclic GFR-binding peptide
GGGGGGVRGNDFFLISLSSLDQPVGGGWFWW

SEQ ID NO: 5615 - protein, 29 aa, Artificial Sequence
  Cyclic GFR-binding peptide
AAAAPKRGVFFLISLSSEETPVGGPGPTG

SEQ ID NO: 5616 - protein, 32 aa, Artificial Sequence
  Cyclic GFR-binding peptide
AAAAAAPTKGIFFLISLSSQGTPVGGGGWFWW

SEQ ID NO: 5617 - protein, 30 aa, Artificial Sequence
  Cyclic GFR-binding peptide
GGGGPTRGVFFLISLSSHHVRSGGGPGPTG

SEQ ID NO: 5618 - protein, 29 aa, Artificial Sequence
  Cyclic GFR-binding peptide
GGGGGGHPKIRFFLISLSSLQVQTGWFWW

SEQ ID NO: 5619 - protein, 27 aa, Artificial Sequence
  Cyclic GFR-binding peptide
AAAAHPKIRFYLVSIANLETPAPGPTG

SEQ ID NO: 5620 - protein, 30 aa, Artificial Sequence
  Cyclic GFR-binding peptide
AAAAAAHPKIRFYLVSIANMKTPAGGWFWW

SEQ ID NO: 5621 - protein, 28 aa, Artificial Sequence
  Cyclic GFR-binding peptide
GGGGHPKIRFYLVSIANLKTPAGPGPTG

SEQ ID NO: 5622 - protein, 31 aa, Artificial Sequence
  Cyclic GFR-binding peptide
GGGGGGKRVYEFYLVSIANLRTPAGGGWFWW

SEQ ID NO: 5623 - protein, 29 aa, Artificial Sequence
  Cyclic GFR-binding peptide
AAAAKRVIEFYLVSIANTKTPAGGPGPTG

SEQ ID NO: 5624 - protein, 30 aa, Artificial Sequence
  Cyclic GFR-binding peptide
GGGGKENEDFYLVSIANLATPAGGGGWFWW

SEQ ID NO: 5625 - protein, 32 aa, Artificial Sequence
  Cyclic GFR-binding peptide
GGGGGGNKNEDFYLVSIANLDTPAGGGPGPTG

SEQ ID NO: 5626 - protein, 27 aa, Artificial Sequence
  Cyclic GFR-binding peptide
AAAAKDYEDFYLVSIANLETPVGWFWW

SEQ ID NO: 5627 - protein, 29 aa, Artificial Sequence
  Cyclic GFR-binding peptide
AAAAAANSSDDFYLVSIANMKEPVPGPTG

SEQ ID NO: 5628 - protein, 28 aa, Artificial Sequence
  Cyclic GFR-binding peptide
GGGGNSSDDFYLVSIANLKTPVGGWFWW

SEQ ID NO: 5629 - protein, 30 aa, Artificial Sequence
  Cyclic GFR-binding peptide
GGGGGGNSSDDFYLVSIANMKTPTGPGPTG

SEQ ID NO: 5630 - protein, 29 aa, Artificial Sequence
  Cyclic GFR-binding peptide
AAAANNSSDFYLVSIANLRAPVGGGWFWW

SEQ ID NO: 5631 - protein, 31 aa, Artificial Sequence
  Cyclic GFR-binding peptide
AAAAAAVGMDDFYLVSIANLRTPVGGPGPTG

SEQ ID NO: 5632 - protein, 30 aa, Artificial Sequence
  Cyclic GFR-binding peptide
GGGGVVGKDFYLVSIANTKVPAGGGGWFWW

SEQ ID NO: 5633 - protein, 32 aa, Artificial Sequence
  Cyclic GFR-binding peptide
GGGGGGQQKDNFYLVSIANLAQPVGGGPGPTG

SEQ ID NO: 5634 - protein, 27 aa, Artificial Sequence
  Cyclic GFR-binding peptide
AAAANNAADFYLVSIANLDQSVGWFWW

SEQ ID NO: 5635 - protein, 29 aa, Artificial Sequence
  Cyclic GFR-binding peptide
AAAAAANNASDFYLVSIANLDQPVPGPTG

SEQ ID NO: 5636 - protein, 28 aa, Artificial Sequence
  Cyclic GFR-binding peptide
GGGGNSSDDFYLVSIANEETPVGGWFWW

SEQ ID NO: 5637 - protein, 30 aa, Artificial Sequence
  Cyclic GFR-binding peptide
GGGGGGVRGNDFYLVSIANQGTPVGPGPTG

SEQ ID NO: 5638 - protein, 29 aa, Artificial Sequence
  Cyclic GFR-binding peptide
AAAAPKRGVFYLVSIANHHVRSGGGWFWW

SEQ ID NO: 5639 - protein, 31 aa, Artificial Sequence
  Cyclic GFR-binding peptide
AAAAAAPTKGIFYLVSIANLQVQTGGPGPTG

SEQ ID NO: 5640 - protein, 30 aa, Artificial Sequence
  Cyclic GFR-binding peptide
GGGGPTRGVYYLVSTASLETPAGGGGWFWW

SEQ ID NO: 5641 - protein, 32 aa, Artificial Sequence
  Cyclic GFR-binding peptide
GGGGGGHPKIRYYLVSTASMKTPAGGGPGPTG

SEQ ID NO: 5642 - protein, 27 aa, Artificial Sequence
  Cyclic GFR-binding peptide
AAAAHPKIRYYLVSTASLKTPAGWFWW

SEQ ID NO: 5643 - protein, 29 aa, Artificial Sequence
  Cyclic GFR-binding peptide
AAAAAAHPKIRYYLVSTASLQTPAPGPTG

SEQ ID NO: 5644 - protein, 28 aa, Artificial Sequence
  Cyclic GFR-binding peptide
GGGGHPKIRYYLVSTASLRTPAGGWFWW

SEQ ID NO: 5645 - protein, 30 aa, Artificial Sequence
  Cyclic GFR-binding peptide
GGGGGGKRVYEYYLVSTASTKTPAGPGPTG

SEQ ID NO: 5646 - protein, 29 aa, Artificial Sequence
  Cyclic GFR-binding peptide
AAAAKRVIEYYLVSTASLATPAGGGWFWW

SEQ ID NO: 5647 - protein, 29 aa, Artificial Sequence
  Cyclic GFR-binding peptide
GGGGKENEDYYLVSTASLDTPAGGPGPTG

SEQ ID NO: 5648 - protein, 32 aa, Artificial Sequence
  Cyclic GFR-binding peptide
GGGGGGNKNEDYYLVSTASLETPVGGGGWFWW

SEQ ID NO: 5649 - protein, 30 aa, Artificial Sequence
  Cyclic GFR-binding peptide
AAAAKDYEDYYLVSTASMKEPVGGGPGPTG

SEQ ID NO: 5650 - protein, 29 aa, Artificial Sequence
  Cyclic GFR-binding peptide
AAAAAANSSDDYYLVSTASLKTPVGWFWW

SEQ ID NO: 5651 - protein, 27 aa, Artificial Sequence
  Cyclic GFR-binding peptide
GGGGNSSDDYYLVSTASMKTPTPGPTG

SEQ ID NO: 5652 - protein, 30 aa, Artificial Sequence
  Cyclic GFR-binding peptide
GGGGGGNSSDDYYLVSTASLRAPVGGWFWW

SEQ ID NO: 5653 - protein, 28 aa, Artificial Sequence
  Cyclic GFR-binding peptide
AAAANNSSDYYLVSTASLRTPVGPGPTG

SEQ ID NO: 5654 - protein, 31 aa, Artificial Sequence
  Cyclic GFR-binding peptide
AAAAAAVGMDDYYLVSTASTKVPAGGGWFWW

SEQ ID NO: 5655 - protein, 29 aa, Artificial Sequence
  Cyclic GFR-binding peptide
GGGGVVGKDYYLVSTASLAQPVGGPGPTG

SEQ ID NO: 5656 - protein, 32 aa, Artificial Sequence
  Cyclic GFR-binding peptide
GGGGGGQQKDNYYLVSTASLDQSVGGGGWFWW

SEQ ID NO: 5657 - protein, 30 aa, Artificial Sequence
  Cyclic GFR-binding peptide
AAAANNAADYYLVSTASLDQPVGGGPGPTG

SEQ ID NO: 5658 - protein, 29 aa, Artificial Sequence
  Cyclic GFR-binding peptide
AAAAAANNASDYYLVSTASEETPVGWFWW

SEQ ID NO: 5659 - protein, 27 aa, Artificial Sequence
  Cyclic GFR-binding peptide
GGGGNSSDDYYLVSTASQGTPVPGPTG

SEQ ID NO: 5660 - protein, 30 aa, Artificial Sequence
  Cyclic GFR-binding peptide
GGGGGGVRGNDYYLVSTASHHVRSGGWFWW

SEQ ID NO: 5661 - protein, 28 aa, Artificial Sequence
  Cyclic GFR-binding peptide
AAAAPKRGVYYLVSTASLQVQTGPGPTG

SEQ ID NO: 5662 - protein, 31 aa, Artificial Sequence
  Cyclic GFR-binding peptide
AAAAAAPTKGIKYLVSIPSLETPVGGGWFWW

SEQ ID NO: 5663 - protein, 29 aa, Artificial Sequence
  Cyclic GFR-binding peptide
GGGGPTRGVKYLVSIPSMKTPVGGPGPTG

SEQ ID NO: 5664 - protein, 32 aa, Artificial Sequence
  Cyclic GFR-binding peptide
GGGGGGHPKIRKYLVSIPSLKTPVGGGGWFWW

SEQ ID NO: 5665 - protein, 30 aa, Artificial Sequence
  Cyclic GFR-binding peptide
AAAAHPKIRKYLVSIPSLQTPVGGGPGPTG

SEQ ID NO: 5666 - protein, 29 aa, Artificial Sequence
  Cyclic GFR-binding peptide
AAAAAAHPKIRKYLVSIPSLRTPVGWFWW

SEQ ID NO: 5667 - protein, 27 aa, Artificial Sequence
  Cyclic GFR-binding peptide
GGGGHPKIRKYLVSIPSTKTPVPGPTG

SEQ ID NO: 5668 - protein, 30 aa, Artificial Sequence
  Cyclic GFR-binding peptide
GGGGGGKRVYEKYLVSIPSLATPVGGWFWW

SEQ ID NO: 5669 - protein, 28 aa, Artificial Sequence
  Cyclic GFR-binding peptide
AAAAKRVIEKYLVSIPSLDTPVGPGPTG

SEQ ID NO: 5670 - protein, 29 aa, Artificial Sequence
  Cyclic GFR-binding peptide
GGGGKENEDKYLVSIPSMKEPVGGGWFWW

SEQ ID NO: 5671 - protein, 31 aa, Artificial Sequence
  Cyclic GFR-binding peptide
GGGGGGNKNEDKYLVSIPSLKTPAGGPGPTG

SEQ ID NO: 5672 - protein, 30 aa, Artificial Sequence
  Cyclic GFR-binding peptide
AAAAKDYEDKYLVSIPSLQTPAGGGGWFWW

SEQ ID NO: 5673 - protein, 32 aa, Artificial Sequence
  Cyclic GFR-binding peptide
AAAAAANSSDDKYLVSIPSMKTPTGGGPGPTG

SEQ ID NO: 5674 - protein, 27 aa, Artificial Sequence
  Cyclic GFR-binding peptide
GGGGNSSDDKYLVSIPSLRAPVGWFWW

SEQ ID NO: 5675 - protein, 29 aa, Artificial Sequence
  Cyclic GFR-binding peptide
GGGGGGNSSDDKYLVSIPSTKVPAPGPTG

SEQ ID NO: 5676 - protein, 28 aa, Artificial Sequence
  Cyclic GFR-binding peptide
AAAANNSSDKYLVSIPSLAQPVGGWFWW

SEQ ID NO: 5677 - protein, 30 aa, Artificial Sequence
  Cyclic GFR-binding peptide
AAAAAAVGMDDKYLVSIPSLDQSVGPGPTG

SEQ ID NO: 5678 - protein, 29 aa, Artificial Sequence
  Cyclic GFR-binding peptide
GGGGVVGKDKYLVSIPSLDQPVGGGWFWW

SEQ ID NO: 5679 - protein, 31 aa, Artificial Sequence
  Cyclic GFR-binding peptide
GGGGGGQQKDNKYLVSIPSHHVRSGGPGPTG

SEQ ID NO: 5680 - protein, 30 aa, Artificial Sequence
  Cyclic GFR-binding peptide
AAAANNAADKYLVSIPSLQVQTGGGGWFWW

SEQ ID NO: 5681 - protein, 32 aa, Artificial Sequence
  Cyclic GFR-binding peptide
AAAAAANNASDLYLISIPELETPVGGGPGPTG

SEQ ID NO: 5682 - protein, 27 aa, Artificial Sequence
  Cyclic GFR-binding peptide
GGGGNSSDDLYLISIPEMKTPVGWFWW

SEQ ID NO: 5683 - protein, 29 aa, Artificial Sequence
  Cyclic GFR-binding peptide
GGGGGGVRGNDLYLISIPELKTPVPGPTG

SEQ ID NO: 5684 - protein, 28 aa, Artificial Sequence
  Cyclic GFR-binding peptide
AAAAPKRGVLYLISIPELQTPVGGWFWW

SEQ ID NO: 5685 - protein, 30 aa, Artificial Sequence
  Cyclic GFR-binding peptide
AAAAAAPTKGILYLISIPELRTPVGPGPTG

SEQ ID NO: 5686 - protein, 29 aa, Artificial Sequence
  Cyclic GFR-binding peptide
GGGGPTRGVLYLISIPETKTPVGGGWFWW

SEQ ID NO: 5687 - protein, 31 aa, Artificial Sequence
  Cyclic GFR-binding peptide
GGGGGGHPKIRLYLISIPELATPVGGPGPTG

SEQ ID NO: 5688 - protein, 30 aa, Artificial Sequence
  Cyclic GFR-binding peptide
AAAAHPKIRLYLISIPELDTPVGGGGWFWW

SEQ ID NO: 5689 - protein, 32 aa, Artificial Sequence
  Cyclic GFR-binding peptide
AAAAAAHPKIRLYLISIPEMKEPVGGGPGPTG

SEQ ID NO: 5690 - protein, 27 aa, Artificial Sequence
  Cyclic GFR-binding peptide
GGGGHPKIRLYLISIPELKTPAGWFWW

SEQ ID NO: 5691 - protein, 29 aa, Artificial Sequence
  Cyclic GFR-binding peptide
GGGGGGKRVYELYLISIPELQTPAPGPTG

SEQ ID NO: 5692 - protein, 28 aa, Artificial Sequence
  Cyclic GFR-binding peptide
AAAAKRVIELYLISIPEMKTPTGGWFWW

SEQ ID NO: 5693 - protein, 28 aa, Artificial Sequence
  Cyclic GFR-binding peptide
GGGGKENEDLYLISIPELRAPVGPGPTG

SEQ ID NO: 5694 - protein, 31 aa, Artificial Sequence
  Cyclic GFR-binding peptide
GGGGGGNKNEDLYLISIPETKVPAGGGWFWW

SEQ ID NO: 5695 - protein, 29 aa, Artificial Sequence
  Cyclic GFR-binding peptide
AAAAKDYEDLYLISIPELAQPVGGPGPTG

SEQ ID NO: 5696 - protein, 32 aa, Artificial Sequence
  Cyclic GFR-binding peptide
AAAAAANSSDDLYLISIPELDQSVGGGGWFWW

SEQ ID NO: 5697 - protein, 30 aa, Artificial Sequence
  Cyclic GFR-binding peptide
GGGGNSSDDLYLISIPELDQPVGGGPGPTG

SEQ ID NO: 5698 - protein, 29 aa, Artificial Sequence
  Cyclic GFR-binding peptide
GGGGGGNSSDDLYLISIPEHHVRSGWFWW

SEQ ID NO: 5699 - protein, 27 aa, Artificial Sequence
  Cyclic GFR-binding peptide
AAAANNSSDLYLISIPELQVQTPGPTG

SEQ ID NO: 5700 - protein, 30 aa, Artificial Sequence
  Cyclic GFR-binding peptide
AAAAAAVGMDDFYLMNIPSLETPTGGWFWW

SEQ ID NO: 5701 - protein, 28 aa, Artificial Sequence
  Cyclic GFR-binding peptide
GGGGVVGKDFYLMNIPSMKTPTGPGPTG

SEQ ID NO: 5702 - protein, 31 aa, Artificial Sequence
  Cyclic GFR-binding peptide
GGGGGGQQKDNFYLMNIPSLKTPTGGGWFWW

SEQ ID NO: 5703 - protein, 29 aa, Artificial Sequence
  Cyclic GFR-binding peptide
AAAANNAADFYLMNIPSLQTPTGGPGPTG

SEQ ID NO: 5704 - protein, 32 aa, Artificial Sequence
  Cyclic GFR-binding peptide
AAAAAANNASDFYLMNIPSLRTPTGGGGWFWW

SEQ ID NO: 5705 - protein, 30 aa, Artificial Sequence
  Cyclic GFR-binding peptide
GGGGNSSDDFYLMNIPSTKTPTGGGPGPTG

SEQ ID NO: 5706 - protein, 29 aa, Artificial Sequence
  Cyclic GFR-binding peptide
GGGGGGVRGNDFYLMNIPSLATPTGWFWW

SEQ ID NO: 5707 - protein, 27 aa, Artificial Sequence
  Cyclic GFR-binding peptide
AAAAPKRGVFYLMNIPSLDTPTPGPTG

SEQ ID NO: 5708 - protein, 30 aa, Artificial Sequence
  Cyclic GFR-binding peptide
AAAAAAPTKGIFYLMNIPSLETPVGGWFWW

SEQ ID NO: 5709 - protein, 28 aa, Artificial Sequence
  Cyclic GFR-binding peptide
GGGGPTRGVFYLMNIPSMKEPVGPGPTG

SEQ ID NO: 5710 - protein, 31 aa, Artificial Sequence
  Cyclic GFR-binding peptide
GGGGGGHPKIRFYLMNIPSLKTPAGGGWFWW

SEQ ID NO: 5711 - protein, 29 aa, Artificial Sequence
  Cyclic GFR-binding peptide
AAAAHPKIRFYLMNIPSLQTPAGGPGPTG

SEQ ID NO: 5712 - protein, 32 aa, Artificial Sequence
  Cyclic GFR-binding peptide
AAAAAAHPKIRFYLMNIPSLKTPVGGGGWFWW

SEQ ID NO: 5713 - protein, 30 aa, Artificial Sequence
  Cyclic GFR-binding peptide
GGGGHPKIRFYLMNIPSLRAPVGGGPGPTG

SEQ ID NO: 5714 - protein, 29 aa, Artificial Sequence
  Cyclic GFR-binding peptide
GGGGGGKRVYEFYLMNIPSLRTPVGWFWW

SEQ ID NO: 5715 - protein, 27 aa, Artificial Sequence
  Cyclic GFR-binding peptide
AAAAKRVIEFYLMNIPSTKVPAPGPTG

SEQ ID NO: 5716 - protein, 28 aa, Artificial Sequence
  Cyclic GFR-binding peptide
GGGGKENEDFYLMNIPSLAQPVGGWFWW

SEQ ID NO: 5717 - protein, 30 aa, Artificial Sequence
  Cyclic GFR-binding peptide
GGGGGGNKNEDFYLMNIPSLDQSVGPGPTG

SEQ ID NO: 5718 - protein, 29 aa, Artificial Sequence
  Cyclic GFR-binding peptide
AAAAKDYEDFYLMNIPSLDQPVGGGWFWW

SEQ ID NO: 5719 - protein, 31 aa, Artificial Sequence
  Cyclic GFR-binding peptide
AAAAAANSSDDFYLMNIPSEETPVGGPGPTG

SEQ ID NO: 5720 - protein, 30 aa, Artificial Sequence
  Cyclic GFR-binding peptide
GGGGNSSDDFYLMNIPSQGTPVGGGGWFWW

SEQ ID NO: 5721 - protein, 32 aa, Artificial Sequence
  Cyclic GFR-binding peptide
GGGGGGNSSDDFYLMNIPSHHVRSGGGPGPTG

SEQ ID NO: 5722 - protein, 27 aa, Artificial Sequence
  Cyclic GFR-binding peptide
AAAANNSSDFYLMNIPSLQVQTGWFWW

SEQ ID NO: 5723 - protein, 29 aa, Artificial Sequence
  Cyclic GFR-binding peptide
AAAAAAVGMDDIYLISIPSLEAPVPGPTG

SEQ ID NO: 5724 - protein, 28 aa, Artificial Sequence
  Cyclic GFR-binding peptide
GGGGVVGKDIYLISIPSMKAPVGGWFWW

SEQ ID NO: 5725 - protein, 30 aa, Artificial Sequence
  Cyclic GFR-binding peptide
GGGGGGQQKDNIYLISIPSLKAPVGPGPTG

SEQ ID NO: 5726 - protein, 29 aa, Artificial Sequence
  Cyclic GFR-binding peptide
AAAANNAADIYLISIPSLQAPVGGGWFWW

SEQ ID NO: 5727 - protein, 31 aa, Artificial Sequence
  Cyclic GFR-binding peptide
AAAAAANNASDIYLISIPSLRAPVGGPGPTG

SEQ ID NO: 5728 - protein, 30 aa, Artificial Sequence
  Cyclic GFR-binding peptide
GGGGNSSDDIYLISIPSTKAPVGGGGWFWW

SEQ ID NO: 5729 - protein, 32 aa, Artificial Sequence
  Cyclic GFR-binding peptide
GGGGGGVRGNDIYLISIPSLAAPVGGGPGPTG

SEQ ID NO: 5730 - protein, 27 aa, Artificial Sequence
  Cyclic GFR-binding peptide
AAAAPKRGVIYLISIPSLDAPVGWFWW

SEQ ID NO: 5731 - protein, 29 aa, Artificial Sequence
  Cyclic GFR-binding peptide
AAAAAAPTKGIIYLISIPSLETPVPGPTG

SEQ ID NO: 5732 - protein, 28 aa, Artificial Sequence
  Cyclic GFR-binding peptide
GGGGPTRGVIYLISIPSMKEPVGGWFWW

SEQ ID NO: 5733 - protein, 30 aa, Artificial Sequence
  Cyclic GFR-binding peptide
GGGGGGHPKIRIYLISIPSLKTPAGPGPTG

SEQ ID NO: 5734 - protein, 29 aa, Artificial Sequence
  Cyclic GFR-binding peptide
AAAAHPKIRIYLISIPSLQTPAGGGWFWW

SEQ ID NO: 5735 - protein, 31 aa, Artificial Sequence
  Cyclic GFR-binding peptide
AAAAAAHPKIRIYLISIPSLKTPVGGPGPTG

SEQ ID NO: 5736 - protein, 30 aa, Artificial Sequence
  Cyclic GFR-binding peptide
GGGGHPKIRIYLISIPSMKTPTGGGGWFWW

SEQ ID NO: 5737 - protein, 32 aa, Artificial Sequence
  Cyclic GFR-binding peptide
GGGGGGKRVYEIYLISIPSLRTPVGGGPGPTG

SEQ ID NO: 5738 - protein, 27 aa, Artificial Sequence
  Cyclic GFR-binding peptide
AAAAKRVIEIYLISIPSTKVPAGWFWW

SEQ ID NO: 5739 - protein, 27 aa, Artificial Sequence
  Cyclic GFR-binding peptide
GGGGKENEDIYLISIPSLAQPVPGPTG

SEQ ID NO: 5740 - protein, 30 aa, Artificial Sequence
  Cyclic GFR-binding peptide
GGGGGGNKNEDIYLISIPSLDQSVGGWFWW

SEQ ID NO: 5741 - protein, 28 aa, Artificial Sequence
  Cyclic GFR-binding peptide
AAAAKDYEDIYLISIPSLDQPVGPGPTG

SEQ ID NO: 5742 - protein, 31 aa, Artificial Sequence
  Cyclic GFR-binding peptide
AAAAAANSSDDIYLISIPSEETPVGGGWFWW

SEQ ID NO: 5743 - protein, 29 aa, Artificial Sequence
  Cyclic GFR-binding peptide
GGGGNSSDDIYLISIPSQGTPVGGPGPTG

SEQ ID NO: 5744 - protein, 32 aa, Artificial Sequence
  Cyclic GFR-binding peptide
GGGGGGNSSDDIYLISIPSHHVRSGGGGWFWW

SEQ ID NO: 5745 - protein, 30 aa, Artificial Sequence
  Cyclic GFR-binding peptide
AAAANNSSDIYLISIPSLQVQTGGGPGPTG

SEQ ID NO: 5746 - protein, 29 aa, Artificial Sequence
  Cyclic GFR-binding peptide
AAAAAAVGMDDIFLISIPSLETPVGWFWW

SEQ ID NO: 5747 - protein, 27 aa, Artificial Sequence
  Cyclic GFR-binding peptide
GGGGVVGKDIFLISIPSMKTPVPGPTG

SEQ ID NO: 5748 - protein, 30 aa, Artificial Sequence
  Cyclic GFR-binding peptide
GGGGGGQQKDNIFLISIPSLKTPVGGWFWW

SEQ ID NO: 5749 - protein, 28 aa, Artificial Sequence
  Cyclic GFR-binding peptide
AAAANNAADIFLISIPSLQTPVGPGPTG

SEQ ID NO: 5750 - protein, 31 aa, Artificial Sequence
  Cyclic GFR-binding peptide
AAAAAANNASDIFLISIPSLRTPVGGGWFWW

SEQ ID NO: 5751 - protein, 29 aa, Artificial Sequence
  Cyclic GFR-binding peptide
GGGGNSSDDIFLISIPSTKTPVGGPGPTG

SEQ ID NO: 5752 - protein, 32 aa, Artificial Sequence
  Cyclic GFR-binding peptide
GGGGGGVRGNDIFLISIPSLATPVGGGGWFWW

SEQ ID NO: 5753 - protein, 30 aa, Artificial Sequence
  Cyclic GFR-binding peptide
AAAAPKRGVIFLISIPSLDTPVGGGPGPTG

SEQ ID NO: 5754 - protein, 29 aa, Artificial Sequence
  Cyclic GFR-binding peptide
AAAAAAPTKGIIFLISIPSMKEPVGWFWW

SEQ ID NO: 5755 - protein, 27 aa, Artificial Sequence
  Cyclic GFR-binding peptide
GGGGPTRGVIFLISIPSLKTPAPGPTG

SEQ ID NO: 5756 - protein, 30 aa, Artificial Sequence
  Cyclic GFR-binding peptide
GGGGGGHPKIRIFLISIPSLQTPAGGWFWW

SEQ ID NO: 5757 - protein, 28 aa, Artificial Sequence
  Cyclic GFR-binding peptide
AAAAHPKIRIFLISIPSMKTPTGPGPTG

SEQ ID NO: 5758 - protein, 31 aa, Artificial Sequence
  Cyclic GFR-binding peptide
AAAAAAHPKIRIFLISIPSLRAPVGGGWFWW

SEQ ID NO: 5759 - protein, 29 aa, Artificial Sequence
  Cyclic GFR-binding peptide
GGGGHPKIRIFLISIPSTKVPAGGPGPTG

SEQ ID NO: 5760 - protein, 32 aa, Artificial Sequence
  Cyclic GFR-binding peptide
GGGGGGKRVYEIFLISIPSLAQPVGGGGWFWW

SEQ ID NO: 5761 - protein, 30 aa, Artificial Sequence
  Cyclic GFR-binding peptide
AAAAKRVIEIFLISIPSLDQSVGGGPGPTG

SEQ ID NO: 5762 - protein, 27 aa, Artificial Sequence
  Cyclic GFR-binding peptide
GGGGKENEDIFLISIPSLDQPVGWFWW

SEQ ID NO: 5763 - protein, 29 aa, Artificial Sequence
  Cyclic GFR-binding peptide
GGGGGGNKNEDIFLISIPSHHVRSPGPTG

SEQ ID NO: 5764 - protein, 28 aa, Artificial Sequence
  Cyclic GFR-binding peptide
AAAAKDYEDIFLISIPSLQVQTGGWFWW

SEQ ID NO: 5765 - protein, 30 aa, Artificial Sequence
  Cyclic GFR-binding peptide
AAAAAANSSDDVYLMSLPKLEVPAGPGPTG

SEQ ID NO: 5766 - protein, 29 aa, Artificial Sequence
  Cyclic GFR-binding peptide
GGGGNSSDDVYLMSLPKMKVPAGGGWFWW

SEQ ID NO: 5767 - protein, 31 aa, Artificial Sequence
  Cyclic GFR-binding peptide
GGGGGGNSSDDVYLMSLPKLKVPAGGPGPTG

SEQ ID NO: 5768 - protein, 30 aa, Artificial Sequence
  Cyclic GFR-binding peptide
AAAANNSSDVYLMSLPKLQVPAGGGGWFWW

SEQ ID NO: 5769 - protein, 32 aa, Artificial Sequence
  Cyclic GFR-binding peptide
AAAAAAVGMDDVYLMSLPKLRVPAGGGPGPTG

SEQ ID NO: 5770 - protein, 27 aa, Artificial Sequence
  Cyclic GFR-binding peptide
GGGGVVGKDVYLMSLPKLAVPAGWFWW

SEQ ID NO: 5771 - protein, 29 aa, Artificial Sequence
  Cyclic GFR-binding peptide
GGGGGGQQKDNVYLMSLPKLDVPAPGPTG

SEQ ID NO: 5772 - protein, 28 aa, Artificial Sequence
  Cyclic GFR-binding peptide
AAAANNAADVYLMSLPKLETPVGGWFWW

SEQ ID NO: 5773 - protein, 30 aa, Artificial Sequence
  Cyclic GFR-binding peptide
AAAAAANNASDVYLMSLPKMKEPVGPGPTG

SEQ ID NO: 5774 - protein, 29 aa, Artificial Sequence
  Cyclic GFR-binding peptide
GGGGNSSDDVYLMSLPKLKTPAGGGWFWW

SEQ ID NO: 5775 - protein, 31 aa, Artificial Sequence
  Cyclic GFR-binding peptide
GGGGGGVRGNDVYLMSLPKLQTPAGGPGPTG

SEQ ID NO: 5776 - protein, 30 aa, Artificial Sequence
  Cyclic GFR-binding peptide
AAAAPKRGVVYLMSLPKLKTPVGGGGWFWW

SEQ ID NO: 5777 - protein, 32 aa, Artificial Sequence
  Cyclic GFR-binding peptide
AAAAAAPTKGIVYLMSLPKMKTPTGGGPGPTG

SEQ ID NO: 5778 - protein, 27 aa, Artificial Sequence
  Cyclic GFR-binding peptide
GGGGPTRGVVYLMSLPKLRAPVGWFWW

SEQ ID NO: 5779 - protein, 29 aa, Artificial Sequence
  Cyclic GFR-binding peptide
GGGGGGHPKIRVYLMSLPKLRTPVPGPTG

SEQ ID NO: 5780 - protein, 28 aa, Artificial Sequence
  Cyclic GFR-binding peptide
AAAAHPKIRVYLMSLPKLAQPVGGWFWW

SEQ ID NO: 5781 - protein, 30 aa, Artificial Sequence
  Cyclic GFR-binding peptide
AAAAAAHPKIRVYLMSLPKLDQSVGPGPTG

SEQ ID NO: 5782 - protein, 29 aa, Artificial Sequence
  Cyclic GFR-binding peptide
GGGGHPKIRVYLMSLPKLDQPVGGGWFWW

SEQ ID NO: 5783 - protein, 31 aa, Artificial Sequence
  Cyclic GFR-binding peptide
GGGGGGKRVYEVYLMSLPKEETPVGGPGPTG

SEQ ID NO: 5784 - protein, 30 aa, Artificial Sequence
  Cyclic GFR-binding peptide
AAAAKRVIEVYLMSLPKQGTPVGGGGWFWW

SEQ ID NO: 5785 - protein, 30 aa, Artificial Sequence
  Cyclic GFR-binding peptide
GGGGKENEDVYLMSLPKHHVRSGGGPGPTG

SEQ ID NO: 5786 - protein, 29 aa, Artificial Sequence
  Cyclic GFR-binding peptide
GGGGGGNKNEDVYLMSLPKLQVQTGWFWW

SEQ ID NO: 5787 - protein, 27 aa, Artificial Sequence
  Cyclic GFR-binding peptide
AAAAKDYEDYYVIPLPELEQPVPGPTG

SEQ ID NO: 5788 - protein, 30 aa, Artificial Sequence
  Cyclic GFR-binding peptide
AAAAAANSSDDYYVIPLPEMKQPVGGWFWW

SEQ ID NO: 5789 - protein, 28 aa, Artificial Sequence
  Cyclic GFR-binding peptide
GGGGNSSDDYYVIPLPELKQPVGPGPTG

SEQ ID NO: 5790 - protein, 31 aa, Artificial Sequence
  Cyclic GFR-binding peptide
GGGGGGNSSDDYYVIPLPELQQPVGGGWFWW

SEQ ID NO: 5791 - protein, 29 aa, Artificial Sequence
  Cyclic GFR-binding peptide
AAAANNSSDYYVIPLPELRQPVGGPGPTG

SEQ ID NO: 5792 - protein, 32 aa, Artificial Sequence
  Cyclic GFR-binding peptide
AAAAAAVGMDDYYVIPLPETKQPVGGGGWFWW

SEQ ID NO: 5793 - protein, 30 aa, Artificial Sequence
  Cyclic GFR-binding peptide
GGGGVVGKDYYVIPLPELDQPVGGGPGPTG

SEQ ID NO: 5794 - protein, 29 aa, Artificial Sequence
  Cyclic GFR-binding peptide
GGGGGGQQKDNYYVIPLPELETPVGWFWW

SEQ ID NO: 5795 - protein, 27 aa, Artificial Sequence
  Cyclic GFR-binding peptide
AAAANNAADYYVIPLPEMKEPVPGPTG

SEQ ID NO: 5796 - protein, 30 aa, Artificial Sequence
  Cyclic GFR-binding peptide
AAAAAANNASDYYVIPLPELKTPAGGWFWW

SEQ ID NO: 5797 - protein, 28 aa, Artificial Sequence
  Cyclic GFR-binding peptide
GGGGNSSDDYYVIPLPELQTPAGPGPTG

SEQ ID NO: 5798 - protein, 31 aa, Artificial Sequence
  Cyclic GFR-binding peptide
GGGGGGVRGNDYYVIPLPELKTPVGGGWFWW

SEQ ID NO: 5799 - protein, 29 aa, Artificial Sequence
  Cyclic GFR-binding peptide
AAAAPKRGVYYVIPLPEMKTPTGGPGPTG

SEQ ID NO: 5800 - protein, 32 aa, Artificial Sequence
  Cyclic GFR-binding peptide
AAAAAAPTKGIYYVIPLPELRAPVGGGGWFWW

SEQ ID NO: 5801 - protein, 30 aa, Artificial Sequence
  Cyclic GFR-binding peptide
GGGGPTRGVYYVIPLPELRTPVGGGPGPTG

SEQ ID NO: 5802 - protein, 29 aa, Artificial Sequence
  Cyclic GFR-binding peptide
GGGGGGHPKIRYYVIPLPETKVPAGWFWW

SEQ ID NO: 5803 - protein, 27 aa, Artificial Sequence
  Cyclic GFR-binding peptide
AAAAHPKIRYYVIPLPELDQSVPGPTG

SEQ ID NO: 5804 - protein, 30 aa, Artificial Sequence
  Cyclic GFR-binding peptide
AAAAAAHPKIRYYVIPLPEEETPVGGWFWW

SEQ ID NO: 5805 - protein, 28 aa, Artificial Sequence
  Cyclic GFR-binding peptide
GGGGHPKIRYYVIPLPEQGTPVGPGPTG

SEQ ID NO: 5806 - protein, 31 aa, Artificial Sequence
  Cyclic GFR-binding peptide
GGGGGGKRVYEYYVIPLPEHHVRSGGGWFWW

SEQ ID NO: 5807 - protein, 29 aa, Artificial Sequence
  Cyclic GFR-binding peptide
AAAAKRVIEYYVIPLPELQVQTGGPGPTG

SEQ ID NO: 5808 - protein, 30 aa, Artificial Sequence
  Cyclic GFR-binding peptide
GGGGKENEDYYLITLPELEQSVGGGGWFWW

SEQ ID NO: 5809 - protein, 32 aa, Artificial Sequence
  Cyclic GFR-binding peptide
GGGGGGNKNEDYYLITLPEMKQSVGGGPGPTG

SEQ ID NO: 5810 - protein, 27 aa, Artificial Sequence
  Cyclic GFR-binding peptide
AAAAKDYEDYYLITLPELKQSVGWFWW

SEQ ID NO: 5811 - protein, 29 aa, Artificial Sequence
  Cyclic GFR-binding peptide
AAAAAANSSDDYYLITLPELQQSVPGPTG

SEQ ID NO: 5812 - protein, 28 aa, Artificial Sequence
  Cyclic GFR-binding peptide
GGGGNSSDDYYLITLPELRQSVGGWFWW

SEQ ID NO: 5813 - protein, 30 aa, Artificial Sequence
  Cyclic GFR-binding peptide
GGGGGGNSSDDYYLITLPETKQSVGPGPTG

SEQ ID NO: 5814 - protein, 29 aa, Artificial Sequence
  Cyclic GFR-binding peptide
AAAANNSSDYYLITLPELAQSVGGGWFWW

SEQ ID NO: 5815 - protein, 31 aa, Artificial Sequence
  Cyclic GFR-binding peptide
AAAAAAVGMDDYYLITLPELDQSVGGPGPTG

SEQ ID NO: 5816 - protein, 30 aa, Artificial Sequence
  Cyclic GFR-binding peptide
GGGGVVGKDYYLITLPELETPVGGGGWFWW

SEQ ID NO: 5817 - protein, 32 aa, Artificial Sequence
  Cyclic GFR-binding peptide
GGGGGGQQKDNYYLITLPEMKEPVGGGPGPTG

SEQ ID NO: 5818 - protein, 27 aa, Artificial Sequence
  Cyclic GFR-binding peptide
AAAANNAADYYLITLPELKTPAGWFWW

SEQ ID NO: 5819 - protein, 29 aa, Artificial Sequence
  Cyclic GFR-binding peptide
AAAAAANNASDYYLITLPELQTPAPGPTG

SEQ ID NO: 5820 - protein, 28 aa, Artificial Sequence
  Cyclic GFR-binding peptide
GGGGNSSDDYYLITLPELKTPVGGWFWW

SEQ ID NO: 5821 - protein, 30 aa, Artificial Sequence
  Cyclic GFR-binding peptide
GGGGGGVRGNDYYLITLPEMKTPTGPGPTG

SEQ ID NO: 5822 - protein, 29 aa, Artificial Sequence
  Cyclic GFR-binding peptide
AAAAPKRGVYYLITLPELRAPVGGGWFWW

SEQ ID NO: 5823 - protein, 31 aa, Artificial Sequence
  Cyclic GFR-binding peptide
AAAAAAPTKGIYYLITLPELRTPVGGPGPTG

SEQ ID NO: 5824 - protein, 30 aa, Artificial Sequence
  Cyclic GFR-binding peptide
GGGGPTRGVYYLITLPETKVPAGGGGWFWW

SEQ ID NO: 5825 - protein, 32 aa, Artificial Sequence
  Cyclic GFR-binding peptide
GGGGGGHPKIRYYLITLPELAQPVGGGPGPTG

SEQ ID NO: 5826 - protein, 27 aa, Artificial Sequence
  Cyclic GFR-binding peptide
AAAAHPKIRYYLITLPEEETPVGWFWW

SEQ ID NO: 5827 - protein, 29 aa, Artificial Sequence
  Cyclic GFR-binding peptide
AAAAAAHPKIRYYLITLPEQGTPVPGPTG

SEQ ID NO: 5828 - protein, 28 aa, Artificial Sequence
  Cyclic GFR-binding peptide
GGGGHPKIRYYLITLPEHHVRSGGWFWW

SEQ ID NO: 5829 - protein, 30 aa, Artificial Sequence
  Cyclic GFR-binding peptide
GGGGGGKRVYEYYLITLPELQVQTGPGPTG

SEQ ID NO: 5830 - protein, 29 aa, Artificial Sequence
  Cyclic GFR-binding peptide
AAAAKRVIEYYLITLPELEQPVGGGWFWW

SEQ ID NO: 5831 - protein, 29 aa, Artificial Sequence
  Cyclic GFR-binding peptide
GGGGKENEDYYLITLPEMKQPVGGPGPTG

SEQ ID NO: 5832 - protein, 32 aa, Artificial Sequence
  Cyclic GFR-binding peptide
GGGGGGNKNEDYYLITLPELKQPVGGGGWFWW

SEQ ID NO: 5833 - protein, 30 aa, Artificial Sequence
  Cyclic GFR-binding peptide
AAAAKDYEDYYLITLPELQQPVGGGPGPTG

SEQ ID NO: 5834 - protein, 29 aa, Artificial Sequence
  Cyclic GFR-binding peptide
AAAAAANSSDDYYLITLPELRQPVGWFWW

SEQ ID NO: 5835 - protein, 27 aa, Artificial Sequence
  Cyclic GFR-binding peptide
GGGGNSSDDYYLITLPETKQPVPGPTG

SEQ ID NO: 5836 - protein, 30 aa, Artificial Sequence
  Cyclic GFR-binding peptide
GGGGGGNSSDDYYLITLPELDQPVGGWFWW

SEQ ID NO: 5837 - protein, 28 aa, Artificial Sequence
  Cyclic GFR-binding peptide
AAAANNSSDMIQMTINSQGTPVGPGPTG

SEQ ID NO: 5838 - protein, 31 aa, Artificial Sequence
  Cyclic GFR-binding peptide
AAAAAAVGMDDMIQMTINSMKEPVGGGWFWW

SEQ ID NO: 5839 - protein, 29 aa, Artificial Sequence
  Cyclic GFR-binding peptide
GGGGVVGKDMIQMTINSLKTPAGGPGPTG

SEQ ID NO: 5840 - protein, 32 aa, Artificial Sequence
  Cyclic GFR-binding peptide
GGGGGGQQKDNMIQMTINSLQTPAGGGGWFWW

SEQ ID NO: 5841 - protein, 30 aa, Artificial Sequence
  Cyclic GFR-binding peptide
AAAANNAADMIQMTINSMKTPTGGGPGPTG

SEQ ID NO: 5842 - protein, 29 aa, Artificial Sequence
  Cyclic GFR-binding peptide
AAAAAANNASDMIQMTINSLRAPVGWFWW

SEQ ID NO: 5843 - protein, 27 aa, Artificial Sequence
  Cyclic GFR-binding peptide
GGGGNSSDDMIQMTINSTKVPAPGPTG

SEQ ID NO: 5844 - protein, 30 aa, Artificial Sequence
  Cyclic GFR-binding peptide
GGGGGGVRGNDMIQMTINSLAQPVGGWFWW

SEQ ID NO: 5845 - protein, 28 aa, Artificial Sequence
  Cyclic GFR-binding peptide
AAAAPKRGVMIQMTINSLDQSVGPGPTG

SEQ ID NO: 5846 - protein, 31 aa, Artificial Sequence
  Cyclic GFR-binding peptide
AAAAAAPTKGIMIQMTINSLDQPVGGGWFWW

SEQ ID NO: 5847 - protein, 29 aa, Artificial Sequence
  Cyclic GFR-binding peptide
GGGGPTRGVMIQMTINSHHVRSGGPGPTG

SEQ ID NO: 5848 - protein, 32 aa, Artificial Sequence
  Cyclic GFR-binding peptide
GGGGGGHPKIRMIQMTINSLQVQTGGGGWFWW

SEQ ID NO: 5849 - protein, 30 aa, Artificial Sequence
  Cyclic GFR-binding peptide
AAAAHPKIRVKAVKVSRLQVRSGGGPGPTG

SEQ ID NO: 5850 - protein, 29 aa, Artificial Sequence
  Cyclic GFR-binding peptide
AAAAAAHPKIRVKAVKVSRLETPVGWFWW

SEQ ID NO: 5851 - protein, 27 aa, Artificial Sequence
  Cyclic GFR-binding peptide
GGGGHPKIRVKAVKVSRMKEPVPGPTG

SEQ ID NO: 5852 - protein, 30 aa, Artificial Sequence
  Cyclic GFR-binding peptide
GGGGGGKRVYEVKAVKVSRLKTPAGGWFWW

SEQ ID NO: 5853 - protein, 28 aa, Artificial Sequence
  Cyclic GFR-binding peptide
AAAAKRVIEVKAVKVSRLQTPAGPGPTG

SEQ ID NO: 5854 - protein, 29 aa, Artificial Sequence
  Cyclic GFR-binding peptide
GGGGKENEDVKAVKVSRLKTPVGGGWFWW

SEQ ID NO: 5855 - protein, 31 aa, Artificial Sequence
  Cyclic GFR-binding peptide
GGGGGGNKNEDVKAVKVSRMKTPTGGPGPTG

SEQ ID NO: 5856 - protein, 30 aa, Artificial Sequence
  Cyclic GFR-binding peptide
AAAAKDYEDVKAVKVSRLRAPVGGGGWFWW

SEQ ID NO: 5857 - protein, 32 aa, Artificial Sequence
  Cyclic GFR-binding peptide
AAAAAANSSDDVKAVKVSRLRTPVGGGPGPTG

SEQ ID NO: 5858 - protein, 27 aa, Artificial Sequence
  Cyclic GFR-binding peptide
GGGGNSSDDVKAVKVSRTKVPAGWFWW

SEQ ID NO: 5859 - protein, 29 aa, Artificial Sequence
  Cyclic GFR-binding peptide
GGGGGGNSSDDVKAVKVSRLAQPVPGPTG

SEQ ID NO: 5860 - protein, 28 aa, Artificial Sequence
  Cyclic GFR-binding peptide
AAAANNSSDVKAVKVSRLDQSVGGWFWW

SEQ ID NO: 5861 - protein, 30 aa, Artificial Sequence
  Cyclic GFR-binding peptide
AAAAAAVGMDDVKAVKVSRLDQPVGPGPTG

SEQ ID NO: 5862 - protein, 29 aa, Artificial Sequence
  Cyclic GFR-binding peptide
GGGGVVGKDVKAVKVSREETPVGGGWFWW

SEQ ID NO: 5863 - protein, 31 aa, Artificial Sequence
  Cyclic GFR-binding peptide
GGGGGGQQKDNVKAVKVSRQGTPVGGPGPTG

SEQ ID NO: 5864 - protein, 30 aa, Artificial Sequence
  Cyclic GFR-binding peptide
AAAANNAADVKAVKVSRLQVQTGGGGWFWW

SEQ ID NO: 5865 - protein, 32 aa, Artificial Sequence
  Cyclic GFR-binding peptide
AAAAAANNASDIKRVQVPRHHVQTGGGPGPTG

SEQ ID NO: 5866 - protein, 27 aa, Artificial Sequence
  Cyclic GFR-binding peptide
GGGGNSSDDIKRVQVPRLETPVGWFWW

SEQ ID NO: 5867 - protein, 29 aa, Artificial Sequence
  Cyclic GFR-binding peptide
GGGGGGVRGNDIKRVQVPRMKEPVPGPTG

SEQ ID NO: 5868 - protein, 28 aa, Artificial Sequence
  Cyclic GFR-binding peptide
AAAAPKRGVIKRVQVPRLKTPAGGWFWW

SEQ ID NO: 5869 - protein, 30 aa, Artificial Sequence
  Cyclic GFR-binding peptide
AAAAAAPTKGIIKRVQVPRLQTPAGPGPTG

SEQ ID NO: 5870 - protein, 29 aa, Artificial Sequence
  Cyclic GFR-binding peptide
GGGGPTRGVIKRVQVPRLKTPVGGGWFWW

SEQ ID NO: 5871 - protein, 31 aa, Artificial Sequence
  Cyclic GFR-binding peptide
GGGGGGHPKIRIKRVQVPRMKTPTGGPGPTG

SEQ ID NO: 5872 - protein, 30 aa, Artificial Sequence
  Cyclic GFR-binding peptide
AAAAHPKIRIKRVQVPRLRAPVGGGGWFWW

SEQ ID NO: 5873 - protein, 32 aa, Artificial Sequence
  Cyclic GFR-binding peptide
AAAAAAHPKIRIKRVQVPRLRTPVGGGPGPTG

SEQ ID NO: 5874 - protein, 27 aa, Artificial Sequence
  Cyclic GFR-binding peptide
GGGGHPKIRIKRVQVPRTKVPAGWFWW

SEQ ID NO: 5875 - protein, 29 aa, Artificial Sequence
  Cyclic GFR-binding peptide
GGGGGGKRVYEIKRVQVPRLAQPVPGPTG

SEQ ID NO: 5876 - protein, 28 aa, Artificial Sequence
  Cyclic GFR-binding peptide
AAAAKRVIEIKRVQVPRLDQSVGGWFWW

SEQ ID NO: 5877 - protein, 28 aa, Artificial Sequence
  Cyclic GFR-binding peptide
GGGGKENEDIKRVQVPRLDQPVGPGPTG

SEQ ID NO: 5878 - protein, 31 aa, Artificial Sequence
  Cyclic GFR-binding peptide
GGGGGGNKNEDIKRVQVPREETPVGGGWFWW

SEQ ID NO: 5879 - protein, 29 aa, Artificial Sequence
  Cyclic GFR-binding peptide
AAAAKDYEDIKRVQVPRQGTPVGGPGPTG

SEQ ID NO: 5880 - protein, 32 aa, Artificial Sequence
  Cyclic GFR-binding peptide
AAAAAANSSDDIKRVQVPRHHVRSGGGGWFWW

SEQ ID NO: 5881 - protein, 27 aa, Artificial Sequence
  Cyclic GFR-binding peptide
GGGGVVKENEDLYLISIASGGGPGPTG

SEQ ID NO: 5882 - protein, 26 aa, Artificial Sequence
  Cyclic GFR-binding peptide
GGGGGGVVNKNEDLYLVSIASGWFWW

SEQ ID NO: 5883 - protein, 24 aa, Artificial Sequence
  Cyclic GFR-binding peptide
AAAAVVKDYEDFFLMSLSSPGPTG

SEQ ID NO: 5884 - protein, 27 aa, Artificial Sequence
  Cyclic GFR-binding peptide
AAAAAAIVNSSDDFFLVSLSSGGWFWW

SEQ ID NO: 5885 - protein, 25 aa, Artificial Sequence
  Cyclic GFR-binding peptide
GGGGIVNSSDDFYLMSIANGPGPTG

SEQ ID NO: 5886 - protein, 28 aa, Artificial Sequence
  Cyclic GFR-binding peptide
GGGGGGIVNSSDDFYLISIANGGGWFWW

SEQ ID NO: 5887 - protein, 26 aa, Artificial Sequence
  Cyclic GFR-binding peptide
AAAAIVNNSSDYYLMSTASGGPGPTG

SEQ ID NO: 5888 - protein, 29 aa, Artificial Sequence
  Cyclic GFR-binding peptide
AAAAAATPVGMDDYYLISTASGGGGWFWW

SEQ ID NO: 5889 - protein, 27 aa, Artificial Sequence
  Cyclic GFR-binding peptide
GGGGYTVVGKDKYLMSIPSGGGPGPTG

SEQ ID NO: 5890 - protein, 26 aa, Artificial Sequence
  Cyclic GFR-binding peptide
GGGGGGIIQQKDNKYLISIPSGWFWW

SEQ ID NO: 5891 - protein, 24 aa, Artificial Sequence
  Cyclic GFR-binding peptide
AAAAVVNNAADLYLMSIPEPGPTG

SEQ ID NO: 5892 - protein, 27 aa, Artificial Sequence
  Cyclic GFR-binding peptide
AAAAAAVVNNASDLYLVSIPEGGWFWW

SEQ ID NO: 5893 - protein, 25 aa, Artificial Sequence
  Cyclic GFR-binding peptide
GGGGIVNSSDDFYLINIPSGPGPTG

SEQ ID NO: 5894 - protein, 28 aa, Artificial Sequence
  Cyclic GFR-binding peptide
GGGGGGLLVRGNDFYLVNIPSGGGWFWW

SEQ ID NO: 5895 - protein, 26 aa, Artificial Sequence
  Cyclic GFR-binding peptide
AAAAVKPKRGVIYLMSIPSGGPGPTG

SEQ ID NO: 5896 - protein, 29 aa, Artificial Sequence
  Cyclic GFR-binding peptide
AAAAAAIKPTKGIIYLVSIPSGGGGWFWW

SEQ ID NO: 5897 - protein, 27 aa, Artificial Sequence
  Cyclic GFR-binding peptide
GGGGVKPTRGVIFLMSIPSGGGPGPTG

SEQ ID NO: 5898 - protein, 28 aa, Artificial Sequence
  Cyclic GFR-binding peptide
GGGGGGHQGQHPKIRIFLVSIPSGWFWW

SEQ ID NO: 5899 - protein, 26 aa, Artificial Sequence
  Cyclic GFR-binding peptide
AAAAHQGQHPKIRVYLISLPKPGPTG

SEQ ID NO: 5900 - protein, 29 aa, Artificial Sequence
  Cyclic GFR-binding peptide
AAAAAAHQGQHPKIRVYLVSLPKGGWFWW

SEQ ID NO: 5901 - protein, 27 aa, Artificial Sequence
  Cyclic GFR-binding peptide
GGGGHQGQHPKIRYYVMPLPEGPGPTG

SEQ ID NO: 5902 - protein, 30 aa, Artificial Sequence
  Cyclic GFR-binding peptide
GGGGGGLKPKKRVYEYYVVPLPEGGGWFWW

SEQ ID NO: 5903 - protein, 28 aa, Artificial Sequence
  Cyclic GFR-binding peptide
AAAAFIPKKRVIEYYLMTLPEGGPGPTG

SEQ ID NO: 5904 - protein, 29 aa, Artificial Sequence
  Cyclic GFR-binding peptide
AAAAAAVVKENEDYYLVTLPEGGGGWFWW

SEQ ID NO: 5905 - protein, 27 aa, Artificial Sequence
  Cyclic GFR-binding peptide
GGGGVVNKNEDMIQITINSGGGPGPTG

SEQ ID NO: 5906 - protein, 26 aa, Artificial Sequence
  Cyclic GFR-binding peptide
GGGGGGVVKDYEDMIQVTINSGWFWW

SEQ ID NO: 5907 - protein, 24 aa, Artificial Sequence
  Cyclic GFR-binding peptide
AAAAIVNSSDDVKAMKVSRPGPTG

SEQ ID NO: 5908 - protein, 27 aa, Artificial Sequence
  Cyclic GFR-binding peptide
AAAAAAIVNSSDDVKAIKVSRGGWFWW

SEQ ID NO: 5909 - protein, 25 aa, Artificial Sequence
  Cyclic GFR-binding peptide
GGGGIVNSSDDIKRMQVPRGPGPTG

SEQ ID NO: 5910 - protein, 28 aa, Artificial Sequence
  Cyclic GFR-binding peptide
GGGGGGIVNNSSDIKRIQVPRGGGWFWW

SEQ ID NO: 5911 - protein, 26 aa, Artificial Sequence
  Cyclic GFR-binding peptide
AAAATPVGMDDLYLMSIASGGPGPTG

SEQ ID NO: 5912 - protein, 29 aa, Artificial Sequence
  Cyclic GFR-binding peptide
AAAAAAYTVVGKDFFLISLSSGGGGWFWW

SEQ ID NO: 5913 - protein, 27 aa, Artificial Sequence
  Cyclic GFR-binding peptide
GGGGIIQQKDNFYLVSIANGGGPGPTG

SEQ ID NO: 5914 - protein, 26 aa, Artificial Sequence
  Cyclic GFR-binding peptide
GGGGGGVVNNAADYYLVSTASGWFWW

SEQ ID NO: 5915 - protein, 24 aa, Artificial Sequence
  Cyclic GFR-binding peptide
AAAAVVNNASDKYLVSIPSPGPTG

SEQ ID NO: 5916 - protein, 27 aa, Artificial Sequence
  Cyclic GFR-binding peptide
AAAAAAIVNSSDDLYLISIPEGGWFWW

SEQ ID NO: 5917 - protein, 25 aa, Artificial Sequence
  Cyclic GFR-binding peptide
GGGGLLVRGNDFYLMNIPSGPGPTG

SEQ ID NO: 5918 - protein, 28 aa, Artificial Sequence
  Cyclic GFR-binding peptide
GGGGGGVKPKRGVIYLISIPSGGGWFWW

SEQ ID NO: 5919 - protein, 26 aa, Artificial Sequence
  Cyclic GFR-binding peptide
AAAAIKPTKGIIFLISIPSGGPGPTG

SEQ ID NO: 5920 - protein, 29 aa, Artificial Sequence
  Cyclic GFR-binding peptide
AAAAAAVKPTRGVVYLMSLPKGGGGWFWW

SEQ ID NO: 5921 - protein, 29 aa, Artificial Sequence
  Cyclic GFR-binding peptide
GGGGHQGQHPKIRYYVIPLPEGGGPGPTG

SEQ ID NO: 5922 - protein, 28 aa, Artificial Sequence
  Cyclic GFR-binding peptide
GGGGGGHQGQHPKIRYYLITLPEGWFWW

SEQ ID NO: 5923 - protein, 26 aa, Artificial Sequence
  Cyclic GFR-binding peptide
AAAAHQGQHPKIRMIQMTINSPGPTG

SEQ ID NO: 5924 - protein, 29 aa, Artificial Sequence
  Cyclic GFR-binding peptide
AAAAAAHQGQHPKIRVKAVKVSRGGWFWW

SEQ ID NO: 5925 - protein, 27 aa, Artificial Sequence
  Cyclic GFR-binding peptide
GGGGLKPKKRVYEIKRVQVPRGPGPTG

SEQ ID NO: 5926 - protein, 20 aa, Artificial Sequence
  Cyclic GFR-binding peptide
GGGGLYLISIASGGGPGPTG

SEQ ID NO: 5927 - protein, 19 aa, Artificial Sequence
  Cyclic GFR-binding peptide
GGGGGGLYLVSIASGWFWW

SEQ ID NO: 5928 - protein, 17 aa, Artificial Sequence
  Cyclic GFR-binding peptide
AAAAFFLMSLSSPGPTG

SEQ ID NO: 5929 - protein, 20 aa, Artificial Sequence
  Cyclic GFR-binding peptide
AAAAAAFFLVSLSSGGWFWW

SEQ ID NO: 5930 - protein, 18 aa, Artificial Sequence
  Cyclic GFR-binding peptide
GGGGFYLMSIANGPGPTG

SEQ ID NO: 5931 - protein, 21 aa, Artificial Sequence
  Cyclic GFR-binding peptide
GGGGGGFYLISIANGGGWFWW

SEQ ID NO: 5932 - protein, 19 aa, Artificial Sequence
  Cyclic GFR-binding peptide
AAAAYYLMSTASGGPGPTG

SEQ ID NO: 5933 - protein, 22 aa, Artificial Sequence
  Cyclic GFR-binding peptide
AAAAAAYYLISTASGGGGWFWW

SEQ ID NO: 5934 - protein, 20 aa, Artificial Sequence
  Cyclic GFR-binding peptide
GGGGKYLMSIPSGGGPGPTG

SEQ ID NO: 5935 - protein, 19 aa, Artificial Sequence
  Cyclic GFR-binding peptide
GGGGGGKYLISIPSGWFWW

SEQ ID NO: 5936 - protein, 17 aa, Artificial Sequence
  Cyclic GFR-binding peptide
AAAALYLMSIPEPGPTG

SEQ ID NO: 5937 - protein, 20 aa, Artificial Sequence
  Cyclic GFR-binding peptide
AAAAAALYLVSIPEGGWFWW

SEQ ID NO: 5938 - protein, 18 aa, Artificial Sequence
  Cyclic GFR-binding peptide
GGGGFYLINIPSGPGPTG

SEQ ID NO: 5939 - protein, 21 aa, Artificial Sequence
  Cyclic GFR-binding peptide
GGGGGGFYLVNIPSGGGWFWW

SEQ ID NO: 5940 - protein, 19 aa, Artificial Sequence
  Cyclic GFR-binding peptide
AAAAIYLMSIPSGGPGPTG

SEQ ID NO: 5941 - protein, 22 aa, Artificial Sequence
  Cyclic GFR-binding peptide
AAAAAAIYLVSIPSGGGGWFWW

SEQ ID NO: 5942 - protein, 20 aa, Artificial Sequence
  Cyclic GFR-binding peptide
GGGGIFLMSIPSGGGPGPTG

SEQ ID NO: 5943 - protein, 19 aa, Artificial Sequence
  Cyclic GFR-binding peptide
GGGGGGIFLVSIPSGWFWW

SEQ ID NO: 5944 - protein, 17 aa, Artificial Sequence
  Cyclic GFR-binding peptide
AAAAVYLISLPKPGPTG

SEQ ID NO: 5945 - protein, 20 aa, Artificial Sequence
  Cyclic GFR-binding peptide
AAAAAAVYLVSLPKGGWFWW

SEQ ID NO: 5946 - protein, 18 aa, Artificial Sequence
  Cyclic GFR-binding peptide
GGGGYYVMPLPEGPGPTG

SEQ ID NO: 5947 - protein, 21 aa, Artificial Sequence
  Cyclic GFR-binding peptide
GGGGGGYYVVPLPEGGGWFWW

SEQ ID NO: 5948 - protein, 19 aa, Artificial Sequence
  Cyclic GFR-binding peptide
AAAAYYLMTLPEGGPGPTG

SEQ ID NO: 5949 - protein, 22 aa, Artificial Sequence
  Cyclic GFR-binding peptide
AAAAAAYYLVTLPEGGGGWFWW

SEQ ID NO: 5950 - protein, 20 aa, Artificial Sequence
  Cyclic GFR-binding peptide
GGGGMIQITINSGGGPGPTG

SEQ ID NO: 5951 - protein, 19 aa, Artificial Sequence
  Cyclic GFR-binding peptide
GGGGGGMIQVTINSGWFWW

SEQ ID NO: 5952 - protein, 17 aa, Artificial Sequence
  Cyclic GFR-binding peptide
AAAAVKAMKVSRPGPTG

SEQ ID NO: 5953 - protein, 20 aa, Artificial Sequence
  Cyclic GFR-binding peptide
AAAAAAVKAIKVSRGGWFWW

SEQ ID NO: 5954 - protein, 18 aa, Artificial Sequence
  Cyclic GFR-binding peptide
GGGGIKRMQVPRGPGPTG

SEQ ID NO: 5955 - protein, 21 aa, Artificial Sequence
  Cyclic GFR-binding peptide
GGGGGGIKRIQVPRGGGWFWW

SEQ ID NO: 5956 - protein, 19 aa, Artificial Sequence
  Cyclic GFR-binding peptide
AAAALYLMSIASGGPGPTG

SEQ ID NO: 5957 - protein, 22 aa, Artificial Sequence
  Cyclic GFR-binding peptide
AAAAAAFFLISLSSGGGGWFWW

SEQ ID NO: 5958 - protein, 20 aa, Artificial Sequence
  Cyclic GFR-binding peptide
GGGGFYLVSIANGGGPGPTG

SEQ ID NO: 5959 - protein, 19 aa, Artificial Sequence
  Cyclic GFR-binding peptide
GGGGGGYYLVSTASGWFWW

SEQ ID NO: 5960 - protein, 17 aa, Artificial Sequence
  Cyclic GFR-binding peptide
AAAAKYLVSIPSPGPTG

SEQ ID NO: 5961 - protein, 20 aa, Artificial Sequence
  Cyclic GFR-binding peptide
AAAAAALYLISIPEGGWFWW

SEQ ID NO: 5962 - protein, 18 aa, Artificial Sequence
  Cyclic GFR-binding peptide
GGGGFYLMNIPSGPGPTG

SEQ ID NO: 5963 - protein, 21 aa, Artificial Sequence
  Cyclic GFR-binding peptide
GGGGGGIYLISIPSGGGWFWW

SEQ ID NO: 5964 - protein, 19 aa, Artificial Sequence
  Cyclic GFR-binding peptide
AAAAIFLISIPSGGPGPTG

SEQ ID NO: 5965 - protein, 22 aa, Artificial Sequence
  Cyclic GFR-binding peptide
AAAAAAVYLMSLPKGGGGWFWW

SEQ ID NO: 5966 - protein, 20 aa, Artificial Sequence
  Cyclic GFR-binding peptide
GGGGYYVIPLPEGGGPGPTG

SEQ ID NO: 5967 - protein, 19 aa, Artificial Sequence
  Cyclic GFR-binding peptide
GGGGGGYYLITLPEGWFWW

SEQ ID NO: 5968 - protein, 17 aa, Artificial Sequence
  Cyclic GFR-binding peptide
AAAAMIQMTINSPGPTG

SEQ ID NO: 5969 - protein, 20 aa, Artificial Sequence
  Cyclic GFR-binding peptide
AAAAAAVKAVKVSRGGWFWW

SEQ ID NO: 5970 - protein, 18 aa, Artificial Sequence
  Cyclic GFR-binding peptide
GGGGIKRVQVPRGPGPTG

SEQ ID NO: 5971 - protein, 15 aa, Artificial Sequence
  Cyclic GFR-binding peptide
GGGGGGGLYLISIAS

SEQ ID NO: 5972 - protein, 16 aa, Artificial Sequence
  Cyclic GFR-binding peptide
GGGGGGGGLYLVSIAS

SEQ ID NO: 5973 - protein, 15 aa, Artificial Sequence
  Cyclic GFR-binding peptide
AAAAAAAFFLMSLSS

SEQ ID NO: 5974 - protein, 16 aa, Artificial Sequence
  Cyclic GFR-binding peptide
AAAAAAAAFFLVSLSS

SEQ ID NO: 5975 - protein, 15 aa, Artificial Sequence
  Cyclic GFR-binding peptide
GGGGGGGFYLMSIAN

SEQ ID NO: 5976 - protein, 16 aa, Artificial Sequence
  Cyclic GFR-binding peptide
GGGGGGGGFYLISIAN

SEQ ID NO: 5977 - protein, 15 aa, Artificial Sequence
  Cyclic GFR-binding peptide
AAAAAAAYYLMSTAS

SEQ ID NO: 5978 - protein, 16 aa, Artificial Sequence
  Cyclic GFR-binding peptide
AAAAAAAAYYLISTAS

SEQ ID NO: 5979 - protein, 15 aa, Artificial Sequence
  Cyclic GFR-binding peptide
GGGGGGGKYLMSIPS

SEQ ID NO: 5980 - protein, 16 aa, Artificial Sequence
  Cyclic GFR-binding peptide
GGGGGGGGKYLISIPS

SEQ ID NO: 5981 - protein, 15 aa, Artificial Sequence
  Cyclic GFR-binding peptide
AAAAAAALYLMSIPE

SEQ ID NO: 5982 - protein, 16 aa, Artificial Sequence
  Cyclic GFR-binding peptide
AAAAAAAALYLVSIPE

SEQ ID NO: 5983 - protein, 15 aa, Artificial Sequence
  Cyclic GFR-binding peptide
GGGGGGGFYLINIPS

SEQ ID NO: 5984 - protein, 16 aa, Artificial Sequence
  Cyclic GFR-binding peptide
GGGGGGGGFYLVNIPS

SEQ ID NO: 5985 - protein, 15 aa, Artificial Sequence
  Cyclic GFR-binding peptide
AAAAAAAIYLMSIPS

SEQ ID NO: 5986 - protein, 16 aa, Artificial Sequence
  Cyclic GFR-binding peptide
AAAAAAAAIYLVSIPS

SEQ ID NO: 5987 - protein, 15 aa, Artificial Sequence
  Cyclic GFR-binding peptide
GGGGGGGIFLMSIPS

SEQ ID NO: 5988 - protein, 16 aa, Artificial Sequence
  Cyclic GFR-binding peptide
GGGGGGGGIFLVSIPS

SEQ ID NO: 5989 - protein, 15 aa, Artificial Sequence
  Cyclic GFR-binding peptide
AAAAAAAVYLISLPK

SEQ ID NO: 5990 - protein, 16 aa, Artificial Sequence
  Cyclic GFR-binding peptide
AAAAAAAAVYLVSLPK

SEQ ID NO: 5991 - protein, 15 aa, Artificial Sequence
  Cyclic GFR-binding peptide
GGGGGGGYYVMPLPE

SEQ ID NO: 5992 - protein, 16 aa, Artificial Sequence
  Cyclic GFR-binding peptide
GGGGGGGGYYVVPLPE

SEQ ID NO: 5993 - protein, 15 aa, Artificial Sequence
  Cyclic GFR-binding peptide
AAAAAAAYYLMTLPE

SEQ ID NO: 5994 - protein, 16 aa, Artificial Sequence
  Cyclic GFR-binding peptide
AAAAAAAAYYLVTLPE

SEQ ID NO: 5995 - protein, 15 aa, Artificial Sequence
  Cyclic GFR-binding peptide
GGGGGGGMIQITINS

SEQ ID NO: 5996 - protein, 16 aa, Artificial Sequence
  Cyclic GFR-binding peptide
GGGGGGGGMIQVTINS

SEQ ID NO: 5997 - protein, 15 aa, Artificial Sequence
  Cyclic GFR-binding peptide
AAAAAAAVKAMKVSR

SEQ ID NO: 5998 - protein, 16 aa, Artificial Sequence
  Cyclic GFR-binding peptide
AAAAAAAAVKAIKVSR

SEQ ID NO: 5999 - protein, 15 aa, Artificial Sequence
  Cyclic GFR-binding peptide
GGGGGGGIKRMQVPR

SEQ ID NO: 6000 - protein, 16 aa, Artificial Sequence
  Cyclic GFR-binding peptide
GGGGGGGGIKRIQVPR

SEQ ID NO: 6001 - protein, 15 aa, Artificial Sequence
  Cyclic GFR-binding peptide
AAAAAAALYLMSIAS

SEQ ID NO: 6002 - protein, 16 aa, Artificial Sequence
  Cyclic GFR-binding peptide
AAAAAAAAFFLISLSS

SEQ ID NO: 6003 - protein, 16 aa, Artificial Sequence
  Cyclic GFR-binding peptide
GGGGGGGGYYLVSTAS

SEQ ID NO: 6004 - protein, 15 aa, Artificial Sequence
  Cyclic GFR-binding peptide
AAAAAAAKYLVSIPS

SEQ ID NO: 6005 - protein, 16 aa, Artificial Sequence
  Cyclic GFR-binding peptide
AAAAAAAALYLISIPE

SEQ ID NO: 6006 - protein, 15 aa, Artificial Sequence
  Cyclic GFR-binding peptide
GGGGGGGFYLMNIPS

SEQ ID NO: 6007 - protein, 15 aa, Artificial Sequence
  Cyclic GFR-binding peptide
AAAAAAAIFLISIPS

SEQ ID NO: 6008 - protein, 16 aa, Artificial Sequence
  Cyclic GFR-binding peptide
AAAAAAAAVYLMSLPK

SEQ ID NO: 6009 - protein, 15 aa, Artificial Sequence
  Cyclic GFR-binding peptide
GGGGGGGYYVIPLPE

SEQ ID NO: 6010 - protein, 16 aa, Artificial Sequence
  Cyclic GFR-binding peptide
GGGGGGGGYYLITLPE

SEQ ID NO: 6011 - protein, 15 aa, Artificial Sequence
  Cyclic GFR-binding peptide
AAAAAAAMIQMTINS

SEQ ID NO: 6012 - protein, 16 aa, Artificial Sequence
  Cyclic GFR-binding peptide
AAAAAAAAVKAVKVSR

SEQ ID NO: 6013 - protein, 15 aa, Artificial Sequence
  Cyclic GFR-binding peptide
GGGGGGGIKRVQVPR

SEQ ID NO: 6014 - protein, 27 aa, Artificial Sequence
  Cyclic GFR-binding peptide
GGGGKENEDLYLMSIASMKTPVHPKIR

SEQ ID NO: 6015 - protein, 29 aa, Artificial Sequence
  Cyclic GFR-binding peptide
GGGGGGNKNEDLYLMSIASLKTPVKRVYE

SEQ ID NO: 6016 - protein, 27 aa, Artificial Sequence
  Cyclic GFR-binding peptide
AAAAKDYEDLYLMSIASLQTPVKRVIE

SEQ ID NO: 6017 - protein, 29 aa, Artificial Sequence
  Cyclic GFR-binding peptide
AAAAAANSSDDLYLMSIASLRTPVKENED

SEQ ID NO: 6018 - protein, 27 aa, Artificial Sequence
  Cyclic GFR-binding peptide
GGGGNSSDDLYLMSIASTKTPVNKNED

SEQ ID NO: 6019 - protein, 29 aa, Artificial Sequence
  Cyclic GFR-binding peptide
GGGGGGNSSDDLYLMSIASLATPVKDYED

SEQ ID NO: 6020 - protein, 27 aa, Artificial Sequence
  Cyclic GFR-binding peptide
AAAANNSSDLYLMSIASLDTPVNSSDD

SEQ ID NO: 6021 - protein, 29 aa, Artificial Sequence
  Cyclic GFR-binding peptide
AAAAAAVGMDDLYLMSIASMKEPVNSSDD

SEQ ID NO: 6022 - protein, 27 aa, Artificial Sequence
  Cyclic GFR-binding peptide
GGGGVVGKDLYLMSIASLKTPANSSDD

SEQ ID NO: 6023 - protein, 29 aa, Artificial Sequence
  Cyclic GFR-binding peptide
GGGGGGQQKDNLYLMSIASLQTPANNSSD

SEQ ID NO: 6024 - protein, 27 aa, Artificial Sequence
  Cyclic GFR-binding peptide
AAAANNAADLYLMSIASMKTPTVGMDD

SEQ ID NO: 6025 - protein, 29 aa, Artificial Sequence
  Cyclic GFR-binding peptide
AAAAAANNASDLYLMSIASLRAPVVVGKD

SEQ ID NO: 6026 - protein, 27 aa, Artificial Sequence
  Cyclic GFR-binding peptide
GGGGNSSDDLYLMSIASTKVPAQQKDN

SEQ ID NO: 6027 - protein, 29 aa, Artificial Sequence
  Cyclic GFR-binding peptide
GGGGGGVRGNDLYLMSIASLAQPVNNAAD

SEQ ID NO: 6028 - protein, 27 aa, Artificial Sequence
  Cyclic GFR-binding peptide
AAAAPKRGVLYLMSIASLDQSVNNASD

SEQ ID NO: 6029 - protein, 29 aa, Artificial Sequence
  Cyclic GFR-binding peptide
AAAAAAPTKGILYLMSIASLDQPVNSSDD

SEQ ID NO: 6030 - protein, 27 aa, Artificial Sequence
  Cyclic GFR-binding peptide
GGGGPTRGVLYLMSIASHHVRSVRGND

SEQ ID NO: 6031 - protein, 29 aa, Artificial Sequence
  Cyclic GFR-binding peptide
GGGGGGHPKIRLYLMSIASLQVQTPKRGV

SEQ ID NO: 6032 - protein, 27 aa, Artificial Sequence
  Cyclic GFR-binding peptide
AAAAHPKIRFFLISLSSLEEPVPTKGI

SEQ ID NO: 6033 - protein, 29 aa, Artificial Sequence
  Cyclic GFR-binding peptide
AAAAAAHPKIRFFLISLSSLKEPVPTRGV

SEQ ID NO: 6034 - protein, 27 aa, Artificial Sequence
  Cyclic GFR-binding peptide
GGGGHPKIRFFLISLSSLQEPVHPKIR

SEQ ID NO: 6035 - protein, 29 aa, Artificial Sequence
  Cyclic GFR-binding peptide
GGGGGGKRVYEFFLISLSSMKEPVHPKIR

SEQ ID NO: 6036 - protein, 27 aa, Artificial Sequence
  Cyclic GFR-binding peptide
AAAAKRVIEFFLISLSSLREPVHPKIR

SEQ ID NO: 6037 - protein, 27 aa, Artificial Sequence
  Cyclic GFR-binding peptide
GGGGKENEDFFLISLSSTKEPVKENED

SEQ ID NO: 6038 - protein, 29 aa, Artificial Sequence
  Cyclic GFR-binding peptide
GGGGGGNKNEDFFLISLSSLAEPVNKNED

SEQ ID NO: 6039 - protein, 27 aa, Artificial Sequence
  Cyclic GFR-binding peptide
AAAAKDYEDFFLISLSSLDEPVKDYED

SEQ ID NO: 6040 - protein, 29 aa, Artificial Sequence
  Cyclic GFR-binding peptide
AAAAAANSSDDFFLISLSSLETPVNSSDD

SEQ ID NO: 6041 - protein, 27 aa, Artificial Sequence
  Cyclic GFR-binding peptide
GGGGNSSDDFFLISLSSLKTPANSSDD

SEQ ID NO: 6042 - protein, 29 aa, Artificial Sequence
  Cyclic GFR-binding peptide
GGGGGGNSSDDFFLISLSSLQTPANSSDD

SEQ ID NO: 6043 - protein, 27 aa, Artificial Sequence
  Cyclic GFR-binding peptide
AAAANNSSDFFLISLSSLKTPVNNSSD

SEQ ID NO: 6044 - protein, 29 aa, Artificial Sequence
  Cyclic GFR-binding peptide
AAAAAAVGMDDFFLISLSSMKTPTVGMDD

SEQ ID NO: 6045 - protein, 27 aa, Artificial Sequence
  Cyclic GFR-binding peptide
GGGGVVGKDFFLISLSSLRAPVVVGKD

SEQ ID NO: 6046 - protein, 29 aa, Artificial Sequence
  Cyclic GFR-binding peptide
GGGGGGQQKDNFFLISLSSLRTPVQQKDN

SEQ ID NO: 6047 - protein, 27 aa, Artificial Sequence
  Cyclic GFR-binding peptide
AAAANNAADFFLISLSSTKVPANNAAD

SEQ ID NO: 6048 - protein, 29 aa, Artificial Sequence
  Cyclic GFR-binding peptide
AAAAAANNASDFFLISLSSLAQPVNNASD

SEQ ID NO: 6049 - protein, 27 aa, Artificial Sequence
  Cyclic GFR-binding peptide
GGGGNSSDDFFLISLSSLDQSVNSSDD

SEQ ID NO: 6050 - protein, 29 aa, Artificial Sequence
  Cyclic GFR-binding peptide
GGGGGGVRGNDFFLISLSSLDQPVVRGND

SEQ ID NO: 6051 - protein, 27 aa, Artificial Sequence
  Cyclic GFR-binding peptide
AAAAPKRGVFFLISLSSEETPVPKRGV

SEQ ID NO: 6052 - protein, 29 aa, Artificial Sequence
  Cyclic GFR-binding peptide
AAAAAAPTKGIFFLISLSSQGTPVPTKGI

SEQ ID NO: 6053 - protein, 27 aa, Artificial Sequence
  Cyclic GFR-binding peptide
GGGGPTRGVFFLISLSSHHVRSPTRGV

SEQ ID NO: 6054 - protein, 29 aa, Artificial Sequence
  Cyclic GFR-binding peptide
GGGGGGHPKIRFFLISLSSLQVQTHPKIR

SEQ ID NO: 6055 - protein, 27 aa, Artificial Sequence
  Cyclic GFR-binding peptide
AAAAHPKIRFYLVSIANLETPAHPKIR

SEQ ID NO: 6056 - protein, 29 aa, Artificial Sequence
  Cyclic GFR-binding peptide
AAAAAAHPKIRFYLVSIANMKTPAHPKIR

SEQ ID NO: 6057 - protein, 27 aa, Artificial Sequence
  Cyclic GFR-binding peptide
GGGGHPKIRFYLVSIANLKTPAHPKIR

SEQ ID NO: 6058 - protein, 29 aa, Artificial Sequence
  Cyclic GFR-binding peptide
GGGGGGKRVYEFYLVSIANLRTPAKRVYE

SEQ ID NO: 6059 - protein, 27 aa, Artificial Sequence
  Cyclic GFR-binding peptide
AAAAKRVIEFYLVSIANTKTPAKRVIE

SEQ ID NO: 6060 - protein, 27 aa, Artificial Sequence
  Cyclic GFR-binding peptide
GGGGKENEDFYLVSIANLATPAKENED

SEQ ID NO: 6061 - protein, 29 aa, Artificial Sequence
  Cyclic GFR-binding peptide
GGGGGGNKNEDFYLVSIANLDTPANKNED

SEQ ID NO: 6062 - protein, 27 aa, Artificial Sequence
  Cyclic GFR-binding peptide
AAAAKDYEDFYLVSIANLETPVKDYED

SEQ ID NO: 6063 - protein, 29 aa, Artificial Sequence
  Cyclic GFR-binding peptide
AAAAAANSSDDFYLVSIANMKEPVNSSDD

SEQ ID NO: 6064 - protein, 27 aa, Artificial Sequence
  Cyclic GFR-binding peptide
GGGGNSSDDFYLVSIANLKTPVNSSDD

SEQ ID NO: 6065 - protein, 29 aa, Artificial Sequence
  Cyclic GFR-binding peptide
GGGGGGNSSDDFYLVSIANMKTPTNSSDD

SEQ ID NO: 6066 - protein, 27 aa, Artificial Sequence
  Cyclic GFR-binding peptide
AAAANNSSDFYLVSIANLRAPVNNSSD

SEQ ID NO: 6067 - protein, 29 aa, Artificial Sequence
  Cyclic GFR-binding peptide
AAAAAAVGMDDFYLVSIANLRTPVVGMDD

SEQ ID NO: 6068 - protein, 27 aa, Artificial Sequence
  Cyclic GFR-binding peptide
GGGGVVGKDFYLVSIANTKVPAVVGKD

SEQ ID NO: 6069 - protein, 29 aa, Artificial Sequence
  Cyclic GFR-binding peptide
GGGGGGQQKDNFYLVSIANLAQPVQQKDN

SEQ ID NO: 6070 - protein, 27 aa, Artificial Sequence
  Cyclic GFR-binding peptide
AAAANNAADFYLVSIANLDQSVNNAAD

SEQ ID NO: 6071 - protein, 29 aa, Artificial Sequence
  Cyclic GFR-binding peptide
AAAAAANNASDFYLVSIANLDQPVNNASD

SEQ ID NO: 6072 - protein, 27 aa, Artificial Sequence
  Cyclic GFR-binding peptide
GGGGNSSDDFYLVSIANEETPVNSSDD

SEQ ID NO: 6073 - protein, 29 aa, Artificial Sequence
  Cyclic GFR-binding peptide
GGGGGGVRGNDFYLVSIANQGTPVVRGND

SEQ ID NO: 6074 - protein, 27 aa, Artificial Sequence
  Cyclic GFR-binding peptide
AAAAPKRGVFYLVSIANHHVRSPKRGV

SEQ ID NO: 6075 - protein, 29 aa, Artificial Sequence
  Cyclic GFR-binding peptide
AAAAAAPTKGIFYLVSIANLQVQTPTKGI

SEQ ID NO: 6076 - protein, 27 aa, Artificial Sequence
  Cyclic GFR-binding peptide
GGGGPTRGVYYLVSTASLETPAPTRGV

SEQ ID NO: 6077 - protein, 29 aa, Artificial Sequence
  Cyclic GFR-binding peptide
GGGGGGHPKIRYYLVSTASMKTPAHPKIR

SEQ ID NO: 6078 - protein, 27 aa, Artificial Sequence
  Cyclic GFR-binding peptide
AAAAHPKIRYYLVSTASLKTPAHPKIR

SEQ ID NO: 6079 - protein, 29 aa, Artificial Sequence
  Cyclic GFR-binding peptide
AAAAAAHPKIRYYLVSTASLQTPAHPKIR

SEQ ID NO: 6080 - protein, 27 aa, Artificial Sequence
  Cyclic GFR-binding peptide
GGGGHPKIRYYLVSTASLRTPAHPKIR

SEQ ID NO: 6081 - protein, 29 aa, Artificial Sequence
  Cyclic GFR-binding peptide
GGGGGGKRVYEYYLVSTASTKTPAKRVYE

SEQ ID NO: 6082 - protein, 27 aa, Artificial Sequence
  Cyclic GFR-binding peptide
AAAAKRVIEYYLVSTASLATPAKRVIE

SEQ ID NO: 6083 - protein, 27 aa, Artificial Sequence
  Cyclic GFR-binding peptide
GGGGKENEDYYLVSTASLDTPAKENED

SEQ ID NO: 6084 - protein, 29 aa, Artificial Sequence
  Cyclic GFR-binding peptide
GGGGGGNKNEDYYLVSTASLETPVNKNED

SEQ ID NO: 6085 - protein, 27 aa, Artificial Sequence
  Cyclic GFR-binding peptide
AAAAKDYEDYYLVSTASMKEPVKDYED

SEQ ID NO: 6086 - protein, 29 aa, Artificial Sequence
  Cyclic GFR-binding peptide
AAAAAANSSDDYYLVSTASLKTPVNSSDD

SEQ ID NO: 6087 - protein, 27 aa, Artificial Sequence
  Cyclic GFR-binding peptide
GGGGNSSDDYYLVSTASMKTPTNSSDD

SEQ ID NO: 6088 - protein, 29 aa, Artificial Sequence
  Cyclic GFR-binding peptide
GGGGGGNSSDDYYLVSTASLRAPVNSSDD

SEQ ID NO: 6089 - protein, 27 aa, Artificial Sequence
  Cyclic GFR-binding peptide
AAAANNSSDYYLVSTASLRTPVNNSSD

SEQ ID NO: 6090 - protein, 29 aa, Artificial Sequence
  Cyclic GFR-binding peptide
AAAAAAVGMDDYYLVSTASTKVPAVGMDD

SEQ ID NO: 6091 - protein, 27 aa, Artificial Sequence
  Cyclic GFR-binding peptide
GGGGVVGKDYYLVSTASLAQPVVVGKD

SEQ ID NO: 6092 - protein, 29 aa, Artificial Sequence
  Cyclic GFR-binding peptide
GGGGGGQQKDNYYLVSTASLDQSVQQKDN

SEQ ID NO: 6093 - protein, 27 aa, Artificial Sequence
  Cyclic GFR-binding peptide
AAAANNAADYYLVSTASLDQPVNNAAD

SEQ ID NO: 6094 - protein, 29 aa, Artificial Sequence
  Cyclic GFR-binding peptide
AAAAAANNASDYYLVSTASEETPVNNASD

SEQ ID NO: 6095 - protein, 27 aa, Artificial Sequence
  Cyclic GFR-binding peptide
GGGGNSSDDYYLVSTASQGTPVNSSDD

SEQ ID NO: 6096 - protein, 29 aa, Artificial Sequence
  Cyclic GFR-binding peptide
GGGGGGVRGNDYYLVSTASHHVRSVRGND

SEQ ID NO: 6097 - protein, 27 aa, Artificial Sequence
  Cyclic GFR-binding peptide
AAAAPKRGVYYLVSTASLQVQTPKRGV

SEQ ID NO: 6098 - protein, 29 aa, Artificial Sequence
  Cyclic GFR-binding peptide
AAAAAAPTKGIKYLVSIPSLETPVPTKGI

SEQ ID NO: 6099 - protein, 27 aa, Artificial Sequence
  Cyclic GFR-binding peptide
GGGGPTRGVKYLVSIPSMKTPVPTRGV

SEQ ID NO: 6100 - protein, 29 aa, Artificial Sequence
  Cyclic GFR-binding peptide
GGGGGGHPKIRKYLVSIPSLKTPVHPKIR

SEQ ID NO: 6101 - protein, 27 aa, Artificial Sequence
  Cyclic GFR-binding peptide
AAAAHPKIRKYLVSIPSLQTPVHPKIR

SEQ ID NO: 6102 - protein, 29 aa, Artificial Sequence
  Cyclic GFR-binding peptide
AAAAAAHPKIRKYLVSIPSLRTPVHPKIR

SEQ ID NO: 6103 - protein, 27 aa, Artificial Sequence
  Cyclic GFR-binding peptide
GGGGHPKIRKYLVSIPSTKTPVHPKIR

SEQ ID NO: 6104 - protein, 29 aa, Artificial Sequence
  Cyclic GFR-binding peptide
GGGGGGKRVYEKYLVSIPSLATPVKRVYE

SEQ ID NO: 6105 - protein, 27 aa, Artificial Sequence
  Cyclic GFR-binding peptide
AAAAKRVIEKYLVSIPSLDTPVKRVIE

SEQ ID NO: 6106 - protein, 27 aa, Artificial Sequence
  Cyclic GFR-binding peptide
GGGGKENEDKYLVSIPSMKEPVKENED

SEQ ID NO: 6107 - protein, 29 aa, Artificial Sequence
  Cyclic GFR-binding peptide
GGGGGGNKNEDKYLVSIPSLKTPANKNED

SEQ ID NO: 6108 - protein, 27 aa, Artificial Sequence
  Cyclic GFR-binding peptide
AAAAKDYEDKYLVSIPSLQTPAKDYED

SEQ ID NO: 6109 - protein, 29 aa, Artificial Sequence
  Cyclic GFR-binding peptide
AAAAAANSSDDKYLVSIPSMKTPTNSSDD

SEQ ID NO: 6110 - protein, 27 aa, Artificial Sequence
  Cyclic GFR-binding peptide
GGGGNSSDDKYLVSIPSLRAPVNSSDD

SEQ ID NO: 6111 - protein, 29 aa, Artificial Sequence
  Cyclic GFR-binding peptide
GGGGGGNSSDDKYLVSIPSTKVPANSSDD

SEQ ID NO: 6112 - protein, 27 aa, Artificial Sequence
  Cyclic GFR-binding peptide
AAAANNSSDKYLVSIPSLAQPVNNSSD

SEQ ID NO: 6113 - protein, 29 aa, Artificial Sequence
  Cyclic GFR-binding peptide
AAAAAAVGMDDKYLVSIPSLDQSVVGMDD

SEQ ID NO: 6114 - protein, 27 aa, Artificial Sequence
  Cyclic GFR-binding peptide
GGGGVVGKDKYLVSIPSLDQPVVVGKD

SEQ ID NO: 6115 - protein, 29 aa, Artificial Sequence
  Cyclic GFR-binding peptide
GGGGGGQQKDNKYLVSIPSHHVRSQQKDN

SEQ ID NO: 6116 - protein, 27 aa, Artificial Sequence
  Cyclic GFR-binding peptide
AAAANNAADKYLVSIPSLQVQTNNAAD

SEQ ID NO: 6117 - protein, 29 aa, Artificial Sequence
  Cyclic GFR-binding peptide
AAAAAANNASDLYLISIPELETPVNNASD

SEQ ID NO: 6118 - protein, 27 aa, Artificial Sequence
  Cyclic GFR-binding peptide
GGGGNSSDDLYLISIPEMKTPVNSSDD

SEQ ID NO: 6119 - protein, 29 aa, Artificial Sequence
  Cyclic GFR-binding peptide
GGGGGGVRGNDLYLISIPELKTPVVRGND

SEQ ID NO: 6120 - protein, 27 aa, Artificial Sequence
  Cyclic GFR-binding peptide
AAAAPKRGVLYLISIPELQTPVPKRGV

SEQ ID NO: 6121 - protein, 29 aa, Artificial Sequence
  Cyclic GFR-binding peptide
AAAAAAPTKGILYLISIPELRTPVPTKGI

SEQ ID NO: 6122 - protein, 27 aa, Artificial Sequence
  Cyclic GFR-binding peptide
GGGGPTRGVLYLISIPETKTPVPTRGV

SEQ ID NO: 6123 - protein, 29 aa, Artificial Sequence
  Cyclic GFR-binding peptide
GGGGGGHPKIRLYLISIPELATPVHPKIR

SEQ ID NO: 6124 - protein, 27 aa, Artificial Sequence
  Cyclic GFR-binding peptide
AAAAHPKIRLYLISIPELDTPVHPKIR

SEQ ID NO: 6125 - protein, 29 aa, Artificial Sequence
  Cyclic GFR-binding peptide
AAAAAAHPKIRLYLISIPEMKEPVHPKIR

SEQ ID NO: 6126 - protein, 27 aa, Artificial Sequence
  Cyclic GFR-binding peptide
GGGGHPKIRLYLISIPELKTPAHPKIR

SEQ ID NO: 6127 - protein, 29 aa, Artificial Sequence
  Cyclic GFR-binding peptide
GGGGGGKRVYELYLISIPELQTPAKRVYE

SEQ ID NO: 6128 - protein, 27 aa, Artificial Sequence
  Cyclic GFR-binding peptide
AAAAKRVIELYLISIPEMKTPTKRVIE

SEQ ID NO: 6129 - protein, 27 aa, Artificial Sequence
  Cyclic GFR-binding peptide
GGGGKENEDLYLISIPELRAPVKENED

SEQ ID NO: 6130 - protein, 29 aa, Artificial Sequence
  Cyclic GFR-binding peptide
GGGGGGNKNEDLYLISIPETKVPANKNED

SEQ ID NO: 6131 - protein, 27 aa, Artificial Sequence
  Cyclic GFR-binding peptide
AAAAKDYEDLYLISIPELAQPVKDYED

SEQ ID NO: 6132 - protein, 29 aa, Artificial Sequence
  Cyclic GFR-binding peptide
AAAAAANSSDDLYLISIPELDQSVNSSDD

SEQ ID NO: 6133 - protein, 27 aa, Artificial Sequence
  Cyclic GFR-binding peptide
GGGGNSSDDLYLISIPELDQPVNSSDD

SEQ ID NO: 6134 - protein, 29 aa, Artificial Sequence
  Cyclic GFR-binding peptide
GGGGGGNSSDDLYLISIPEHHVRSNSSDD

SEQ ID NO: 6135 - protein, 27 aa, Artificial Sequence
  Cyclic GFR-binding peptide
AAAANNSSDLYLISIPELQVQTNNSSD

SEQ ID NO: 6136 - protein, 29 aa, Artificial Sequence
  Cyclic GFR-binding peptide
AAAAAAVGMDDFYLMNIPSLETPTVGMDD

SEQ ID NO: 6137 - protein, 27 aa, Artificial Sequence
  Cyclic GFR-binding peptide
GGGGVVGKDFYLMNIPSMKTPTVVGKD

SEQ ID NO: 6138 - protein, 29 aa, Artificial Sequence
  Cyclic GFR-binding peptide
GGGGGGQQKDNFYLMNIPSLKTPTQQKDN

SEQ ID NO: 6139 - protein, 27 aa, Artificial Sequence
  Cyclic GFR-binding peptide
AAAANNAADFYLMNIPSLQTPTNNAAD

SEQ ID NO: 6140 - protein, 29 aa, Artificial Sequence
  Cyclic GFR-binding peptide
AAAAAANNASDFYLMNIPSLRTPTNNASD

SEQ ID NO: 6141 - protein, 27 aa, Artificial Sequence
  Cyclic GFR-binding peptide
GGGGNSSDDFYLMNIPSTKTPTNSSDD

SEQ ID NO: 6142 - protein, 29 aa, Artificial Sequence
  Cyclic GFR-binding peptide
GGGGGGVRGNDFYLMNIPSLATPTVRGND

SEQ ID NO: 6143 - protein, 27 aa, Artificial Sequence
  Cyclic GFR-binding peptide
AAAAPKRGVFYLMNIPSLDTPTPKRGV

SEQ ID NO: 6144 - protein, 29 aa, Artificial Sequence
  Cyclic GFR-binding peptide
AAAAAAPTKGIFYLMNIPSLETPVPTKGI

SEQ ID NO: 6145 - protein, 27 aa, Artificial Sequence
  Cyclic GFR-binding peptide
GGGGPTRGVFYLMNIPSMKEPVPTRGV

SEQ ID NO: 6146 - protein, 29 aa, Artificial Sequence
  Cyclic GFR-binding peptide
GGGGGGHPKIRFYLMNIPSLKTPAHPKIR

SEQ ID NO: 6147 - protein, 27 aa, Artificial Sequence
  Cyclic GFR-binding peptide
AAAAHPKIRFYLMNIPSLQTPAHPKIR

SEQ ID NO: 6148 - protein, 29 aa, Artificial Sequence
  Cyclic GFR-binding peptide
AAAAAAHPKIRFYLMNIPSLKTPVHPKIR

SEQ ID NO: 6149 - protein, 27 aa, Artificial Sequence
  Cyclic GFR-binding peptide
GGGGHPKIRFYLMNIPSLRAPVHPKIR

SEQ ID NO: 6150 - protein, 29 aa, Artificial Sequence
  Cyclic GFR-binding peptide
GGGGGGKRVYEFYLMNIPSLRTPVKRVYE

SEQ ID NO: 6151 - protein, 27 aa, Artificial Sequence
  Cyclic GFR-binding peptide
AAAAKRVIEFYLMNIPSTKVPAKRVIE

SEQ ID NO: 6152 - protein, 27 aa, Artificial Sequence
  Cyclic GFR-binding peptide
GGGGKENEDFYLMNIPSLAQPVKENED

SEQ ID NO: 6153 - protein, 29 aa, Artificial Sequence
  Cyclic GFR-binding peptide
GGGGGGNKNEDFYLMNIPSLDQSVNKNED

SEQ ID NO: 6154 - protein, 27 aa, Artificial Sequence
  Cyclic GFR-binding peptide
AAAAKDYEDFYLMNIPSLDQPVKDYED

SEQ ID NO: 6155 - protein, 29 aa, Artificial Sequence
  Cyclic GFR-binding peptide
AAAAAANSSDDFYLMNIPSEETPVNSSDD

SEQ ID NO: 6156 - protein, 27 aa, Artificial Sequence
  Cyclic GFR-binding peptide
GGGGNSSDDFYLMNIPSQGTPVNSSDD

SEQ ID NO: 6157 - protein, 29 aa, Artificial Sequence
  Cyclic GFR-binding peptide
GGGGGGNSSDDFYLMNIPSHHVRSNSSDD

SEQ ID NO: 6158 - protein, 27 aa, Artificial Sequence
  Cyclic GFR-binding peptide
AAAANNSSDFYLMNIPSLQVQTNNSSD

SEQ ID NO: 6159 - protein, 29 aa, Artificial Sequence
  Cyclic GFR-binding peptide
AAAAAAVGMDDIYLISIPSLEAPVVGMDD

SEQ ID NO: 6160 - protein, 27 aa, Artificial Sequence
  Cyclic GFR-binding peptide
GGGGVVGKDIYLISIPSMKAPVVVGKD

SEQ ID NO: 6161 - protein, 29 aa, Artificial Sequence
  Cyclic GFR-binding peptide
GGGGGGQQKDNIYLISIPSLKAPVQQKDN

SEQ ID NO: 6162 - protein, 27 aa, Artificial Sequence
  Cyclic GFR-binding peptide
AAAANNAADIYLISIPSLQAPVNNAAD

SEQ ID NO: 6163 - protein, 29 aa, Artificial Sequence
  Cyclic GFR-binding peptide
AAAAAANNASDIYLISIPSLRAPVNNASD

SEQ ID NO: 6164 - protein, 27 aa, Artificial Sequence
  Cyclic GFR-binding peptide
GGGGNSSDDIYLISIPSTKAPVNSSDD

SEQ ID NO: 6165 - protein, 29 aa, Artificial Sequence
  Cyclic GFR-binding peptide
GGGGGGVRGNDIYLISIPSLAAPVVRGND

SEQ ID NO: 6166 - protein, 27 aa, Artificial Sequence
  Cyclic GFR-binding peptide
AAAAPKRGVIYLISIPSLDAPVPKRGV

SEQ ID NO: 6167 - protein, 29 aa, Artificial Sequence
  Cyclic GFR-binding peptide
AAAAAAPTKGIIYLISIPSLETPVPTKGI

SEQ ID NO: 6168 - protein, 27 aa, Artificial Sequence
  Cyclic GFR-binding peptide
GGGGPTRGVIYLISIPSMKEPVPTRGV

SEQ ID NO: 6169 - protein, 29 aa, Artificial Sequence
  Cyclic GFR-binding peptide
GGGGGGHPKIRIYLISIPSLKTPAHPKIR

SEQ ID NO: 6170 - protein, 27 aa, Artificial Sequence
  Cyclic GFR-binding peptide
AAAAHPKIRIYLISIPSLQTPAHPKIR

SEQ ID NO: 6171 - protein, 29 aa, Artificial Sequence
  Cyclic GFR-binding peptide
AAAAAAHPKIRIYLISIPSLKTPVHPKIR

SEQ ID NO: 6172 - protein, 27 aa, Artificial Sequence
  Cyclic GFR-binding peptide
GGGGHPKIRIYLISIPSMKTPTHPKIR

SEQ ID NO: 6173 - protein, 29 aa, Artificial Sequence
  Cyclic GFR-binding peptide
GGGGGGKRVYEIYLISIPSLRTPVKRVYE

SEQ ID NO: 6174 - protein, 27 aa, Artificial Sequence
  Cyclic GFR-binding peptide
AAAAKRVIEIYLISIPSTKVPAKRVIE

SEQ ID NO: 6175 - protein, 27 aa, Artificial Sequence
  Cyclic GFR-binding peptide
GGGGKENEDIYLISIPSLAQPVKENED

SEQ ID NO: 6176 - protein, 29 aa, Artificial Sequence
  Cyclic GFR-binding peptide
GGGGGGNKNEDIYLISIPSLDQSVNKNED

SEQ ID NO: 6177 - protein, 27 aa, Artificial Sequence
  Cyclic GFR-binding peptide
AAAAKDYEDIYLISIPSLDQPVKDYED

SEQ ID NO: 6178 - protein, 29 aa, Artificial Sequence
  Cyclic GFR-binding peptide
AAAAAANSSDDIYLISIPSEETPVNSSDD

SEQ ID NO: 6179 - protein, 27 aa, Artificial Sequence
  Cyclic GFR-binding peptide
GGGGNSSDDIYLISIPSQGTPVNSSDD

SEQ ID NO: 6180 - protein, 29 aa, Artificial Sequence
  Cyclic GFR-binding peptide
GGGGGGNSSDDIYLISIPSHHVRSNSSDD

SEQ ID NO: 6181 - protein, 27 aa, Artificial Sequence
  Cyclic GFR-binding peptide
AAAANNSSDIYLISIPSLQVQTNNSSD

SEQ ID NO: 6182 - protein, 29 aa, Artificial Sequence
  Cyclic GFR-binding peptide
AAAAAAVGMDDIFLISIPSLETPVVGMDD

SEQ ID NO: 6183 - protein, 27 aa, Artificial Sequence
  Cyclic GFR-binding peptide
GGGGVVGKDIFLISIPSMKTPVVVGKD

SEQ ID NO: 6184 - protein, 29 aa, Artificial Sequence
  Cyclic GFR-binding peptide
GGGGGGQQKDNIFLISIPSLKTPVQQKDN

SEQ ID NO: 6185 - protein, 27 aa, Artificial Sequence
  Cyclic GFR-binding peptide
AAAANNAADIFLISIPSLQTPVNNAAD

SEQ ID NO: 6186 - protein, 29 aa, Artificial Sequence
  Cyclic GFR-binding peptide
AAAAAANNASDIFLISIPSLRTPVNNASD

SEQ ID NO: 6187 - protein, 27 aa, Artificial Sequence
  Cyclic GFR-binding peptide
GGGGNSSDDIFLISIPSTKTPVNSSDD

SEQ ID NO: 6188 - protein, 29 aa, Artificial Sequence
  Cyclic GFR-binding peptide
GGGGGGVRGNDIFLISIPSLATPVVRGND

SEQ ID NO: 6189 - protein, 27 aa, Artificial Sequence
  Cyclic GFR-binding peptide
AAAAPKRGVIFLISIPSLDTPVPKRGV

SEQ ID NO: 6190 - protein, 29 aa, Artificial Sequence
  Cyclic GFR-binding peptide
AAAAAAPTKGIIFLISIPSMKEPVPTKGI

SEQ ID NO: 6191 - protein, 27 aa, Artificial Sequence
  Cyclic GFR-binding peptide
GGGGPTRGVIFLISIPSLKTPAPTRGV

SEQ ID NO: 6192 - protein, 29 aa, Artificial Sequence
  Cyclic GFR-binding peptide
GGGGGGHPKIRIFLISIPSLQTPAHPKIR

SEQ ID NO: 6193 - protein, 27 aa, Artificial Sequence
  Cyclic GFR-binding peptide
AAAAHPKIRIFLISIPSMKTPTHPKIR

SEQ ID NO: 6194 - protein, 29 aa, Artificial Sequence
  Cyclic GFR-binding peptide
AAAAAAHPKIRIFLISIPSLRAPVHPKIR

SEQ ID NO: 6195 - protein, 27 aa, Artificial Sequence
  Cyclic GFR-binding peptide
GGGGHPKIRIFLISIPSTKVPAHPKIR

SEQ ID NO: 6196 - protein, 29 aa, Artificial Sequence
  Cyclic GFR-binding peptide
GGGGGGKRVYEIFLISIPSLAQPVKRVYE

SEQ ID NO: 6197 - protein, 27 aa, Artificial Sequence
  Cyclic GFR-binding peptide
AAAAKRVIEIFLISIPSLDQSVKRVIE

SEQ ID NO: 6198 - protein, 27 aa, Artificial Sequence
  Cyclic GFR-binding peptide
GGGGKENEDIFLISIPSLDQPVKENED

SEQ ID NO: 6199 - protein, 29 aa, Artificial Sequence
  Cyclic GFR-binding peptide
GGGGGGNKNEDIFLISIPSHHVRSNKNED

SEQ ID NO: 6200 - protein, 27 aa, Artificial Sequence
  Cyclic GFR-binding peptide
AAAAKDYEDIFLISIPSLQVQTKDYED

SEQ ID NO: 6201 - protein, 29 aa, Artificial Sequence
  Cyclic GFR-binding peptide
AAAAAANSSDDVYLMSLPKLEVPANSSDD

SEQ ID NO: 6202 - protein, 27 aa, Artificial Sequence
  Cyclic GFR-binding peptide
GGGGNSSDDVYLMSLPKMKVPANSSDD

SEQ ID NO: 6203 - protein, 29 aa, Artificial Sequence
  Cyclic GFR-binding peptide
GGGGGGNSSDDVYLMSLPKLKVPANSSDD

SEQ ID NO: 6204 - protein, 27 aa, Artificial Sequence
  Cyclic GFR-binding peptide
AAAANNSSDVYLMSLPKLQVPANNSSD

SEQ ID NO: 6205 - protein, 29 aa, Artificial Sequence
  Cyclic GFR-binding peptide
AAAAAAVGMDDVYLMSLPKLRVPAVGMDD

SEQ ID NO: 6206 - protein, 27 aa, Artificial Sequence
  Cyclic GFR-binding peptide
GGGGVVGKDVYLMSLPKLAVPAVVGKD

SEQ ID NO: 6207 - protein, 29 aa, Artificial Sequence
  Cyclic GFR-binding peptide
GGGGGGQQKDNVYLMSLPKLDVPAQQKDN

SEQ ID NO: 6208 - protein, 27 aa, Artificial Sequence
  Cyclic GFR-binding peptide
AAAANNAADVYLMSLPKLETPVNNAAD

SEQ ID NO: 6209 - protein, 29 aa, Artificial Sequence
  Cyclic GFR-binding peptide
AAAAAANNASDVYLMSLPKMKEPVNNASD

SEQ ID NO: 6210 - protein, 27 aa, Artificial Sequence
  Cyclic GFR-binding peptide
GGGGNSSDDVYLMSLPKLKTPANSSDD

SEQ ID NO: 6211 - protein, 29 aa, Artificial Sequence
  Cyclic GFR-binding peptide
GGGGGGVRGNDVYLMSLPKLQTPAVRGND

SEQ ID NO: 6212 - protein, 27 aa, Artificial Sequence
  Cyclic GFR-binding peptide
AAAAPKRGVVYLMSLPKLKTPVPKRGV

SEQ ID NO: 6213 - protein, 29 aa, Artificial Sequence
  Cyclic GFR-binding peptide
AAAAAAPTKGIVYLMSLPKMKTPTPTKGI

SEQ ID NO: 6214 - protein, 27 aa, Artificial Sequence
  Cyclic GFR-binding peptide
GGGGPTRGVVYLMSLPKLRAPVKENED

SEQ ID NO: 6215 - protein, 29 aa, Artificial Sequence
  Cyclic GFR-binding peptide
GGGGGGHPKIRVYLMSLPKLRTPVNKNED

SEQ ID NO: 6216 - protein, 27 aa, Artificial Sequence
  Cyclic GFR-binding peptide
AAAAHPKIRVYLMSLPKLAQPVKDYED

SEQ ID NO: 6217 - protein, 29 aa, Artificial Sequence
  Cyclic GFR-binding peptide
AAAAAAHPKIRVYLMSLPKLDQSVNSSDD

SEQ ID NO: 6218 - protein, 27 aa, Artificial Sequence
  Cyclic GFR-binding peptide
GGGGHPKIRVYLMSLPKLDQPVNSSDD

SEQ ID NO: 6219 - protein, 29 aa, Artificial Sequence
  Cyclic GFR-binding peptide
GGGGGGKRVYEVYLMSLPKEETPVNSSDD

SEQ ID NO: 6220 - protein, 27 aa, Artificial Sequence
  Cyclic GFR-binding peptide
AAAAKRVIEVYLMSLPKQGTPVNNSSD

SEQ ID NO: 6221 - protein, 27 aa, Artificial Sequence
  Cyclic GFR-binding peptide
GGGGKENEDVYLMSLPKHHVRSVGMDD

SEQ ID NO: 6222 - protein, 29 aa, Artificial Sequence
  Cyclic GFR-binding peptide
GGGGGGNKNEDVYLMSLPKLQVQTVVGKD

SEQ ID NO: 6223 - protein, 27 aa, Artificial Sequence
  Cyclic GFR-binding peptide
AAAAKDYEDYYVIPLPELEQPVQQKDN

SEQ ID NO: 6224 - protein, 29 aa, Artificial Sequence
  Cyclic GFR-binding peptide
AAAAAANSSDDYYVIPLPEMKQPVNNAAD

SEQ ID NO: 6225 - protein, 27 aa, Artificial Sequence
  Cyclic GFR-binding peptide
GGGGNSSDDYYVIPLPELKQPVNNASD

SEQ ID NO: 6226 - protein, 29 aa, Artificial Sequence
  Cyclic GFR-binding peptide
GGGGGGNSSDDYYVIPLPELQQPVNSSDD

SEQ ID NO: 6227 - protein, 27 aa, Artificial Sequence
  Cyclic GFR-binding peptide
AAAANNSSDYYVIPLPELRQPVVRGND

SEQ ID NO: 6228 - protein, 29 aa, Artificial Sequence
  Cyclic GFR-binding peptide
AAAAAAVGMDDYYVIPLPETKQPVPKRGV

SEQ ID NO: 6229 - protein, 27 aa, Artificial Sequence
  Cyclic GFR-binding peptide
GGGGVVGKDYYVIPLPELDQPVPTKGI

SEQ ID NO: 6230 - protein, 29 aa, Artificial Sequence
  Cyclic GFR-binding peptide
GGGGGGQQKDNYYVIPLPELETPVPTRGV

SEQ ID NO: 6231 - protein, 27 aa, Artificial Sequence
  Cyclic GFR-binding peptide
AAAANNAADYYVIPLPEMKEPVHPKIR

SEQ ID NO: 6232 - protein, 29 aa, Artificial Sequence
  Cyclic GFR-binding peptide
AAAAAANNASDYYVIPLPELKTPAHPKIR

SEQ ID NO: 6233 - protein, 27 aa, Artificial Sequence
  Cyclic GFR-binding peptide
GGGGNSSDDYYVIPLPELQTPAHPKIR

SEQ ID NO: 6234 - protein, 29 aa, Artificial Sequence
  Cyclic GFR-binding peptide
GGGGGGVRGNDYYVIPLPELKTPVHPKIR

SEQ ID NO: 6235 - protein, 27 aa, Artificial Sequence
  Cyclic GFR-binding peptide
AAAAPKRGVYYVIPLPEMKTPTKRVYE

SEQ ID NO: 6236 - protein, 29 aa, Artificial Sequence
  Cyclic GFR-binding peptide
AAAAAAPTKGIYYVIPLPELRAPVKRVIE

SEQ ID NO: 6237 - protein, 27 aa, Artificial Sequence
  Cyclic GFR-binding peptide
GGGGPTRGVYYVIPLPELRTPVKENED

SEQ ID NO: 6238 - protein, 29 aa, Artificial Sequence
  Cyclic GFR-binding peptide
GGGGGGHPKIRYYVIPLPETKVPANKNED

SEQ ID NO: 6239 - protein, 27 aa, Artificial Sequence
  Cyclic GFR-binding peptide
AAAAHPKIRYYVIPLPELDQSVKDYED

SEQ ID NO: 6240 - protein, 29 aa, Artificial Sequence
  Cyclic GFR-binding peptide
AAAAAAHPKIRYYVIPLPEEETPVNSSDD

SEQ ID NO: 6241 - protein, 27 aa, Artificial Sequence
  Cyclic GFR-binding peptide
GGGGHPKIRYYVIPLPEQGTPVNSSDD

SEQ ID NO: 6242 - protein, 29 aa, Artificial Sequence
  Cyclic GFR-binding peptide
GGGGGGKRVYEYYVIPLPEHHVRSNSSDD

SEQ ID NO: 6243 - protein, 27 aa, Artificial Sequence
  Cyclic GFR-binding peptide
AAAAKRVIEYYVIPLPELQVQTNNSSD

SEQ ID NO: 6244 - protein, 27 aa, Artificial Sequence
  Cyclic GFR-binding peptide
GGGGKENEDYYLITLPELEQSVVGMDD

SEQ ID NO: 6245 - protein, 29 aa, Artificial Sequence
  Cyclic GFR-binding peptide
GGGGGGNKNEDYYLITLPEMKQSVVVGKD

SEQ ID NO: 6246 - protein, 27 aa, Artificial Sequence
  Cyclic GFR-binding peptide
AAAAKDYEDYYLITLPELKQSVQQKDN

SEQ ID NO: 6247 - protein, 29 aa, Artificial Sequence
  Cyclic GFR-binding peptide
AAAAAANSSDDYYLITLPELQQSVNNAAD

SEQ ID NO: 6248 - protein, 27 aa, Artificial Sequence
  Cyclic GFR-binding peptide
GGGGNSSDDYYLITLPELRQSVNNASD

SEQ ID NO: 6249 - protein, 29 aa, Artificial Sequence
  Cyclic GFR-binding peptide
GGGGGGNSSDDYYLITLPETKQSVNSSDD

SEQ ID NO: 6250 - protein, 27 aa, Artificial Sequence
  Cyclic GFR-binding peptide
AAAANNSSDYYLITLPELAQSVVRGND

SEQ ID NO: 6251 - protein, 29 aa, Artificial Sequence
  Cyclic GFR-binding peptide
AAAAAAVGMDDYYLITLPELDQSVPKRGV

SEQ ID NO: 6252 - protein, 27 aa, Artificial Sequence
  Cyclic GFR-binding peptide
GGGGVVGKDYYLITLPELETPVPTKGI

SEQ ID NO: 6253 - protein, 29 aa, Artificial Sequence
  Cyclic GFR-binding peptide
GGGGGGQQKDNYYLITLPEMKEPVPTRGV

SEQ ID NO: 6254 - protein, 27 aa, Artificial Sequence
  Cyclic GFR-binding peptide
AAAANNAADYYLITLPELKTPAHPKIR

SEQ ID NO: 6255 - protein, 29 aa, Artificial Sequence
  Cyclic GFR-binding peptide
AAAAAANNASDYYLITLPELQTPAHPKIR

SEQ ID NO: 6256 - protein, 27 aa, Artificial Sequence
  Cyclic GFR-binding peptide
GGGGNSSDDYYLITLPELKTPVHPKIR

SEQ ID NO: 6257 - protein, 29 aa, Artificial Sequence
  Cyclic GFR-binding peptide
GGGGGGVRGNDYYLITLPEMKTPTHPKIR

SEQ ID NO: 6258 - protein, 27 aa, Artificial Sequence
  Cyclic GFR-binding peptide
AAAAPKRGVYYLITLPELRAPVKRVYE

SEQ ID NO: 6259 - protein, 29 aa, Artificial Sequence
  Cyclic GFR-binding peptide
AAAAAAPTKGIYYLITLPELRTPVKRVIE

SEQ ID NO: 6260 - protein, 27 aa, Artificial Sequence
  Cyclic GFR-binding peptide
GGGGPTRGVYYLITLPETKVPAKENED

SEQ ID NO: 6261 - protein, 29 aa, Artificial Sequence
  Cyclic GFR-binding peptide
GGGGGGHPKIRYYLITLPELAQPVNKNED

SEQ ID NO: 6262 - protein, 27 aa, Artificial Sequence
  Cyclic GFR-binding peptide
AAAAHPKIRYYLITLPEEETPVKDYED

SEQ ID NO: 6263 - protein, 29 aa, Artificial Sequence
  Cyclic GFR-binding peptide
AAAAAAHPKIRYYLITLPEQGTPVNSSDD

SEQ ID NO: 6264 - protein, 27 aa, Artificial Sequence
  Cyclic GFR-binding peptide
GGGGHPKIRYYLITLPEHHVRSNSSDD

SEQ ID NO: 6265 - protein, 29 aa, Artificial Sequence
  Cyclic GFR-binding peptide
GGGGGGKRVYEYYLITLPELQVQTNSSDD

SEQ ID NO: 6266 - protein, 27 aa, Artificial Sequence
  Cyclic GFR-binding peptide
AAAAKRVIEYYLITLPELEQPVNNSSD

SEQ ID NO: 6267 - protein, 27 aa, Artificial Sequence
  Cyclic GFR-binding peptide
GGGGKENEDYYLITLPEMKQPVVGMDD

SEQ ID NO: 6268 - protein, 29 aa, Artificial Sequence
  Cyclic GFR-binding peptide
GGGGGGNKNEDYYLITLPELKQPVVVGKD

SEQ ID NO: 6269 - protein, 27 aa, Artificial Sequence
  Cyclic GFR-binding peptide
AAAAKDYEDYYLITLPELQQPVQQKDN

SEQ ID NO: 6270 - protein, 29 aa, Artificial Sequence
  Cyclic GFR-binding peptide
AAAAAANSSDDYYLITLPELRQPVNNAAD

SEQ ID NO: 6271 - protein, 27 aa, Artificial Sequence
  Cyclic GFR-binding peptide
GGGGNSSDDYYLITLPETKQPVNNASD

SEQ ID NO: 6272 - protein, 29 aa, Artificial Sequence
  Cyclic GFR-binding peptide
GGGGGGNSSDDYYLITLPELDQPVNSSDD

SEQ ID NO: 6273 - protein, 27 aa, Artificial Sequence
  Cyclic GFR-binding peptide
AAAANNSSDMIQMTINSQGTPVVRGND

SEQ ID NO: 6274 - protein, 29 aa, Artificial Sequence
  Cyclic GFR-binding peptide
AAAAAAVGMDDMIQMTINSMKEPVPKRGV

SEQ ID NO: 6275 - protein, 27 aa, Artificial Sequence
  Cyclic GFR-binding peptide
GGGGVVGKDMIQMTINSLKTPAPTKGI

SEQ ID NO: 6276 - protein, 29 aa, Artificial Sequence
  Cyclic GFR-binding peptide
GGGGGGQQKDNMIQMTINSLQTPAPTRGV

SEQ ID NO: 6277 - protein, 27 aa, Artificial Sequence
  Cyclic GFR-binding peptide
AAAANNAADMIQMTINSMKTPTHPKIR

SEQ ID NO: 6278 - protein, 29 aa, Artificial Sequence
  Cyclic GFR-binding peptide
AAAAAANNASDMIQMTINSLRAPVHPKIR

SEQ ID NO: 6279 - protein, 27 aa, Artificial Sequence
  Cyclic GFR-binding peptide
GGGGNSSDDMIQMTINSTKVPAHPKIR

SEQ ID NO: 6280 - protein, 29 aa, Artificial Sequence
  Cyclic GFR-binding peptide
GGGGGGVRGNDMIQMTINSLAQPVHPKIR

SEQ ID NO: 6281 - protein, 27 aa, Artificial Sequence
  Cyclic GFR-binding peptide
AAAAPKRGVMIQMTINSLDQSVKRVYE

SEQ ID NO: 6282 - protein, 29 aa, Artificial Sequence
  Cyclic GFR-binding peptide
AAAAAAPTKGIMIQMTINSLDQPVKRVIE

SEQ ID NO: 6283 - protein, 27 aa, Artificial Sequence
  Cyclic GFR-binding peptide
GGGGPTRGVMIQMTINSHHVRSKENED

SEQ ID NO: 6284 - protein, 29 aa, Artificial Sequence
  Cyclic GFR-binding peptide
GGGGGGHPKIRMIQMTINSLQVQTNKNED

SEQ ID NO: 6285 - protein, 27 aa, Artificial Sequence
  Cyclic GFR-binding peptide
AAAAHPKIRVKAVKVSRLQVRSKDYED

SEQ ID NO: 6286 - protein, 29 aa, Artificial Sequence
  Cyclic GFR-binding peptide
AAAAAAHPKIRVKAVKVSRLETPVNSSDD

SEQ ID NO: 6287 - protein, 27 aa, Artificial Sequence
  Cyclic GFR-binding peptide
GGGGHPKIRVKAVKVSRMKEPVNSSDD

SEQ ID NO: 6288 - protein, 29 aa, Artificial Sequence
  Cyclic GFR-binding peptide
GGGGGGKRVYEVKAVKVSRLKTPANSSDD

SEQ ID NO: 6289 - protein, 27 aa, Artificial Sequence
  Cyclic GFR-binding peptide
AAAAKRVIEVKAVKVSRLQTPANNSSD

SEQ ID NO: 6290 - protein, 27 aa, Artificial Sequence
  Cyclic GFR-binding peptide
GGGGKENEDVKAVKVSRLKTPVVGMDD

SEQ ID NO: 6291 - protein, 29 aa, Artificial Sequence
  Cyclic GFR-binding peptide
GGGGGGNKNEDVKAVKVSRMKTPTVVGKD

SEQ ID NO: 6292 - protein, 27 aa, Artificial Sequence
  Cyclic GFR-binding peptide
AAAAKDYEDVKAVKVSRLRAPVQQKDN

SEQ ID NO: 6293 - protein, 29 aa, Artificial Sequence
  Cyclic GFR-binding peptide
AAAAAANSSDDVKAVKVSRLRTPVNNAAD

SEQ ID NO: 6294 - protein, 27 aa, Artificial Sequence
  Cyclic GFR-binding peptide
GGGGNSSDDVKAVKVSRTKVPANNASD

SEQ ID NO: 6295 - protein, 29 aa, Artificial Sequence
  Cyclic GFR-binding peptide
GGGGGGNSSDDVKAVKVSRLAQPVNSSDD

SEQ ID NO: 6296 - protein, 27 aa, Artificial Sequence
  Cyclic GFR-binding peptide
AAAANNSSDVKAVKVSRLDQSVVRGND

SEQ ID NO: 6297 - protein, 29 aa, Artificial Sequence
  Cyclic GFR-binding peptide
AAAAAAVGMDDVKAVKVSRLDQPVPKRGV

SEQ ID NO: 6298 - protein, 27 aa, Artificial Sequence
  Cyclic GFR-binding peptide
GGGGVVGKDVKAVKVSREETPVPTKGI

SEQ ID NO: 6299 - protein, 29 aa, Artificial Sequence
  Cyclic GFR-binding peptide
GGGGGGQQKDNVKAVKVSRQGTPVPTRGV

SEQ ID NO: 6300 - protein, 27 aa, Artificial Sequence
  Cyclic GFR-binding peptide
AAAANNAADVKAVKVSRLQVQTHPKIR

SEQ ID NO: 6301 - protein, 29 aa, Artificial Sequence
  Cyclic GFR-binding peptide
AAAAAANNASDIKRVQVPRHHVQTHPKIR

SEQ ID NO: 6302 - protein, 27 aa, Artificial Sequence
  Cyclic GFR-binding peptide
GGGGNSSDDIKRVQVPRLETPVHPKIR

SEQ ID NO: 6303 - protein, 29 aa, Artificial Sequence
  Cyclic GFR-binding peptide
GGGGGGVRGNDIKRVQVPRMKEPVHPKIR

SEQ ID NO: 6304 - protein, 27 aa, Artificial Sequence
  Cyclic GFR-binding peptide
AAAAPKRGVIKRVQVPRLKTPAKRVYE

SEQ ID NO: 6305 - protein, 29 aa, Artificial Sequence
  Cyclic GFR-binding peptide
AAAAAAPTKGIIKRVQVPRLQTPAKRVIE

SEQ ID NO: 6306 - protein, 27 aa, Artificial Sequence
  Cyclic GFR-binding peptide
GGGGPTRGVIKRVQVPRLKTPVKENED

SEQ ID NO: 6307 - protein, 29 aa, Artificial Sequence
  Cyclic GFR-binding peptide
GGGGGGHPKIRIKRVQVPRMKTPTNKNED

SEQ ID NO: 6308 - protein, 27 aa, Artificial Sequence
  Cyclic GFR-binding peptide
AAAAHPKIRIKRVQVPRLRAPVKDYED

SEQ ID NO: 6309 - protein, 29 aa, Artificial Sequence
  Cyclic GFR-binding peptide
AAAAAAHPKIRIKRVQVPRLRTPVNSSDD

SEQ ID NO: 6310 - protein, 27 aa, Artificial Sequence
  Cyclic GFR-binding peptide
GGGGHPKIRIKRVQVPRTKVPANSSDD

SEQ ID NO: 6311 - protein, 29 aa, Artificial Sequence
  Cyclic GFR-binding peptide
GGGGGGKRVYEIKRVQVPRLAQPVNSSDD

SEQ ID NO: 6312 - protein, 27 aa, Artificial Sequence
  Cyclic GFR-binding peptide
AAAAKRVIEIKRVQVPRLDQSVNNSSD

SEQ ID NO: 6313 - protein, 27 aa, Artificial Sequence
  Cyclic GFR-binding peptide
GGGGKENEDIKRVQVPRLDQPVVGMDD

SEQ ID NO: 6314 - protein, 29 aa, Artificial Sequence
  Cyclic GFR-binding peptide
GGGGGGNKNEDIKRVQVPREETPVVVGKD

SEQ ID NO: 6315 - protein, 27 aa, Artificial Sequence
  Cyclic GFR-binding peptide
AAAAKDYEDIKRVQVPRQGTPVQQKDN

SEQ ID NO: 6316 - protein, 29 aa, Artificial Sequence
  Cyclic GFR-binding peptide
AAAAAANSSDDIKRVQVPRHHVRSNNAAD

SEQ ID NO: 6317 - protein, 22 aa, Artificial Sequence
  Cyclic GFR-binding peptide
  MOD_RES (16)..(17): Xaa is C or S
EDKYLMSIPSLETPVXXAKPIS

SEQ ID NO: 6318 - protein, 15 aa, Artificial Sequence
  Cyclic GFR-binding peptide
IKPTKGIFYLISIAN

SEQ ID NO: 6319 - protein, 13 aa, Artificial Sequence
  Cyclic GFR-binding peptide
LYLVSIASLQTPA

SEQ ID NO: 6320 - protein, 26 aa, Artificial Sequence
  Cyclic GFR-binding peptide
  MOD_RES (22)..(22): Xaa is C or S
KKRVIEKYLVSIPSLQVQTPRXQVNR

SEQ ID NO: 6321 - protein, 21 aa, Artificial Sequence
  Cyclic GFR-binding peptide
FIPKKRVIEFYLVSIANLQVQ

SEQ ID NO: 6322 - protein, 15 aa, Artificial Sequence
  Cyclic GFR-binding peptide
IVNSSDDKYLVSIPS

SEQ ID NO: 6323 - protein, 17 aa, Artificial Sequence
  Cyclic GFR-binding peptide
IVNSSDDLYLVSIASLK

SEQ ID NO: 6324 - protein, 19 aa, Artificial Sequence
  Cyclic GFR-binding peptide
  MOD_RES (14)..(15): Xaa is C or S
LYLISIASLDQSVXXPSAS

SEQ ID NO: 6325 - protein, 18 aa, Artificial Sequence
  Cyclic GFR-binding peptide
FIPKKRVIEFYLVSIANL

SEQ ID NO: 6326 - protein, 24 aa, Artificial Sequence
  Cyclic GFR-binding peptide
  MOD_RES (18)..(19): Xaa is C or S
SSDDYYLVSTASLQTPAXXPKPVT

SEQ ID NO: 6327 - protein, 21 aa, Artificial Sequence
  Cyclic GFR-binding peptide
  MOD_RES (15)..(15): Xaa is C or S
DKYLVSIPSLKTPAXTPKTVH

SEQ ID NO: 6328 - protein, 21 aa, Artificial Sequence
  Cyclic GFR-binding peptide
  MOD_RES (15)..(16): Xaa is C or S
DFYLMSIANLETPVXXAKPIS

SEQ ID NO: 6329 - protein, 17 aa, Artificial Sequence
  Cyclic GFR-binding peptide
VKPTRGVKYLISIPSLD

SEQ ID NO: 6330 - protein, 23 aa, Artificial Sequence
  Cyclic GFR-binding peptide
  MOD_RES (17)..(18): Xaa is C or S
YEDKYLMSIPSLETPVXXAKPIS

SEQ ID NO: 6331 - protein, 13 aa, Artificial Sequence
  Cyclic GFR-binding peptide
LYLISIASLAQPV

SEQ ID NO: 6332 - protein, 22 aa, Artificial Sequence
  Cyclic GFR-binding peptide
  MOD_RES (16)..(17): Xaa is C or S
DDYYLVSTASLQTPAXXPKPVT

SEQ ID NO: 6333 - protein, 16 aa, Artificial Sequence
  Cyclic GFR-binding peptide
  MOD_RES (14)..(15): Xaa is C or S
YYLVSTASLQTPAXXP

SEQ ID NO: 6334 - protein, 15 aa, Artificial Sequence
  Cyclic GFR-binding peptide
IKPTKGILYLISIAS

SEQ ID NO: 6335 - protein, 26 aa, Artificial Sequence
  Cyclic GFR-binding peptide
  MOD_RES (20)..(21): Xaa is C or S
KPTRGVFYLISIANLDQPVXXPSASA

SEQ ID NO: 6336 - protein, 16 aa, Artificial Sequence
  Cyclic GFR-binding peptide
  MOD_RES (14)..(15): Xaa is C or S
YYLISTASLAQPVXXP

SEQ ID NO: 6337 - protein, 23 aa, Artificial Sequence
  Cyclic GFR-binding peptide
  MOD_RES (17)..(18): Xaa is C or S
RGVLYLISIASLAQPVXXPAASA

SEQ ID NO: 6338 - protein, 24 aa, Artificial Sequence
  Cyclic GFR-binding peptide
  MOD_RES (18)..(19): Xaa is C or S
TRGVLYLISIASLDQPVXXPSASA

SEQ ID NO: 6339 - protein, 26 aa, Artificial Sequence
  Cyclic GFR-binding peptide
  MOD_RES (20)..(21): Xaa is C or S
KPKRGVLYLISIASLAQPVXXPAASA

SEQ ID NO: 6340 - protein, 22 aa, Artificial Sequence
  Cyclic GFR-binding peptide
  MOD_RES (16)..(17): Xaa is C or S
SDKYLVSIPSLKTPAXXAKPVA

SEQ ID NO: 6341 - protein, 18 aa, Artificial Sequence
  Cyclic GFR-binding peptide
  MOD_RES (14)..(15): Xaa is C or S
YYLISTASLDQPVXXPSA

SEQ ID NO: 6342 - protein, 18 aa, Artificial Sequence
  Cyclic GFR-binding peptide
  MOD_RES (14)..(15): Xaa is C or S
YYLISTASLAQPVXXPAA

SEQ ID NO: 6343 - protein, 18 aa, Artificial Sequence
  Cyclic GFR-binding peptide
  MOD_RES (14)..(15): Xaa is C or S
FYLVSIANLKTPAXXAKP

SEQ ID NO: 6344 - protein, 26 aa, Artificial Sequence
  Cyclic GFR-binding peptide
  MOD_RES (20)..(21): Xaa is C or S
VNNSSDKYLVSIPSLKTPAXXAKPVA

SEQ ID NO: 6345 - protein, 18 aa, Artificial Sequence
  Cyclic GFR-binding peptide
VVKENEDYYLMSTASLET

SEQ ID NO: 6346 - protein, 24 aa, Artificial Sequence
  Cyclic GFR-binding peptide
  MOD_RES (18)..(19): Xaa is C or S
ENEDKYLMSIPSLETPVXXAKPIK

SEQ ID NO: 6347 - protein, 25 aa, Artificial Sequence
  Cyclic GFR-binding peptide
  MOD_RES (19)..(20): Xaa is C or S
PTRGVFYLISIANLDQPVXXPSASA

SEQ ID NO: 6348 - protein, 17 aa, Artificial Sequence
  Cyclic GFR-binding peptide
  MOD_RES (16)..(16): Xaa is C or S
KYLVSIPSLQVQTPRXQ

SEQ ID NO: 6349 - protein, 21 aa, Artificial Sequence
  Cyclic GFR-binding peptide
FIPKKRVIELYLVSIASLQVQ

SEQ ID NO: 6350 - protein, 18 aa, Artificial Sequence
  Cyclic GFR-binding peptide
  MOD_RES (16)..(16): Xaa is C or S
LYLVSIASLQVQTPRXQV

SEQ ID NO: 6351 - protein, 17 aa, Artificial Sequence
  Cyclic GFR-binding peptide
IVNSSDDLYLVSIASLQ

SEQ ID NO: 6352 - protein, 21 aa, Artificial Sequence
  Cyclic GFR-binding peptide
  MOD_RES (15)..(16): Xaa is C or S
DLYLVSIASLKTPAXXAKPVA

SEQ ID NO: 6353 - protein, 24 aa, Artificial Sequence
  Cyclic GFR-binding peptide
  MOD_RES (18)..(19): Xaa is C or S
KRGVYYLISTASLAQPVXXPAASA

SEQ ID NO: 6354 - protein, 25 aa, Artificial Sequence
  Cyclic GFR-binding peptide
  MOD_RES (19)..(20): Xaa is C or S
PTKGIYYLISTASLDQSVXXPSASA

SEQ ID NO: 6355 - protein, 22 aa, Artificial Sequence
  Cyclic GFR-binding peptide
  MOD_RES (16)..(17): Xaa is C or S
GIKYLISIPSLDQSVXXPSASA

SEQ ID NO: 6356 - protein, 25 aa, Artificial Sequence
  Cyclic GFR-binding peptide
  MOD_RES (19)..(20): Xaa is C or S
NNSSDLYLVSIASLKTPAXXAKPVA

SEQ ID NO: 6357 - protein, 17 aa, Artificial Sequence
  Cyclic GFR-binding peptide
  MOD_RES (16)..(16): Xaa is C or S
LYLVSIASLQVQTPRXQ

SEQ ID NO: 6358 - protein, 15 aa, Artificial Sequence
  Cyclic GFR-binding peptide
VKPKRGVFYLISIAN

SEQ ID NO: 6359 - protein, 23 aa, Artificial Sequence
  Cyclic GFR-binding peptide
  MOD_RES (17)..(18): Xaa is C or S
RGVYYLISTASLDQPVXXPSASA

SEQ ID NO: 6360 - protein, 16 aa, Artificial Sequence
  Cyclic GFR-binding peptide
IVNSSDDLYLVSIASL

SEQ ID NO: 6361 - protein, 23 aa, Artificial Sequence
  Cyclic GFR-binding peptide
  MOD_RES (19)..(19): Xaa is C or S
VIELYLVSIASLQVQTPRXQVNR

SEQ ID NO: 6362 - protein, 13 aa, Artificial Sequence
  Cyclic GFR-binding peptide
LYLISIASLDQSV

SEQ ID NO: 6363 - protein, 21 aa, Artificial Sequence
  Cyclic GFR-binding peptide
  MOD_RES (15)..(16): Xaa is C or S
DFYLMSIANLETPVXXAKPIK

SEQ ID NO: 6364 - protein, 29 aa, Artificial Sequence
  Cyclic GFR-binding peptide
  MOD_RES (25)..(25): Xaa is C or S
FIPKKRVIELYLVSIASLQVQTPRXQVNR

SEQ ID NO: 6365 - protein, 16 aa, Artificial Sequence
  Cyclic GFR-binding peptide
IKPTKGIYYLISTASL

SEQ ID NO: 6366 - protein, 20 aa, Artificial Sequence
  Cyclic GFR-binding peptide
  MOD_RES (14)..(15): Xaa is C or S
FYLVSIANLKTPAXXAKPVA

SEQ ID NO: 6367 - protein, 22 aa, Artificial Sequence
  Cyclic GFR-binding peptide
  MOD_RES (16)..(17): Xaa is C or S
DDLYLVSIASLQTPAXXPKPVT

SEQ ID NO: 6368 - protein, 15 aa, Artificial Sequence
  Cyclic GFR-binding peptide
  MOD_RES (14)..(15): Xaa is C or S
LYLISIASLAQPVXX

SEQ ID NO: 6369 - protein, 15 aa, Artificial Sequence
  Cyclic GFR-binding peptide
VKPKRGVYYLISTAS

SEQ ID NO: 6370 - protein, 24 aa, Artificial Sequence
  Cyclic GFR-binding peptide
  MOD_RES (18)..(19): Xaa is C or S
GMDDLYLVSIASLKTPVXXAKGVK

SEQ ID NO: 6371 - protein, 27 aa, Artificial Sequence
  Cyclic GFR-binding peptide
  MOD_RES (21)..(22): Xaa is C or S
VKPKRGVLYLISIASLAQPVXXPAASA

SEQ ID NO: 6372 - protein, 15 aa, Artificial Sequence
  Cyclic GFR-binding peptide
IKPTKGIYYLISTAS

SEQ ID NO: 6373 - protein, 22 aa, Artificial Sequence
  Cyclic GFR-binding peptide
  MOD_RES (18)..(18): Xaa is C or S
IELYLVSIASLQVQTPRXQVNR

SEQ ID NO: 6374 - protein, 15 aa, Artificial Sequence
  Cyclic GFR-binding peptide
  MOD_RES (14)..(14): Xaa is C or S
YYLVSTASLKTPAXT

SEQ ID NO: 6375 - protein, 22 aa, Artificial Sequence
  Cyclic GFR-binding peptide
  MOD_RES (16)..(16): Xaa is C or S
DDKYLVSIPSLKTPAXTPKTVH

SEQ ID NO: 6376 - protein, 25 aa, Artificial Sequence
  Cyclic GFR-binding peptide
  MOD_RES (19)..(20): Xaa is C or S
VGMDDLYLVSIASLKTPVXXAKGVK

SEQ ID NO: 6377 - protein, 29 aa, Artificial Sequence
  Cyclic GFR-binding peptide
  MOD_RES (25)..(25): Xaa is C or S
FIPKKRVIEFYLVSIANLQVQTPRXQVNR

SEQ ID NO: 6378 - protein, 27 aa, Artificial Sequence
  Cyclic GFR-binding peptide
  MOD_RES (21)..(22): Xaa is C or S
VVKDYEDKYLMSIPSLETPVXXAKPIS

SEQ ID NO: 6379 - protein, 27 aa, Artificial Sequence
  Cyclic GFR-binding peptide
  MOD_RES (21)..(22): Xaa is C or S
IVNNSSDFYLVSIANLKTPAXXAKPVA

SEQ ID NO: 6380 - protein, 20 aa, Artificial Sequence
  Cyclic GFR-binding peptide
  MOD_RES (14)..(15): Xaa is C or S
YYLMSTASLETPVXXAKPIS

SEQ ID NO: 6381 - protein, 17 aa, Artificial Sequence
  Cyclic GFR-binding peptide
VKPTRGVFYLISIANLD

SEQ ID NO: 6382 - protein, 17 aa, Artificial Sequence
  Cyclic GFR-binding peptide
  MOD_RES (14)..(15): Xaa is C or S
FYLMSIANLETPVXXAK

SEQ ID NO: 6383 - protein, 17 aa, Artificial Sequence
  Cyclic GFR-binding peptide
IVNSSDDKYLVSIPSLQ

SEQ ID NO: 6384 - protein, 20 aa, Artificial Sequence
  Cyclic GFR-binding peptide
  MOD_RES (14)..(15): Xaa is C or S
LYLVSIASLQTPAXXPKPVT

SEQ ID NO: 6385 - protein, 19 aa, Artificial Sequence
  Cyclic GFR-binding peptide
  MOD_RES (14)..(15): Xaa is C or S
LYLVSIASLQTPAXXPKPV

SEQ ID NO: 6386 - protein, 17 aa, Artificial Sequence
  Cyclic GFR-binding peptide
IVNSSDDKYLVSIPSLK

SEQ ID NO: 6387 - protein, 17 aa, Artificial Sequence
  Cyclic GFR-binding peptide
  MOD_RES (14)..(15): Xaa is C or S
KYLMSIPSLETPVXXAK

SEQ ID NO: 6388 - protein, 14 aa, Artificial Sequence
  Cyclic GFR-binding peptide
  MOD_RES (14)..(14): Xaa is C or S
LYLISIASLAQPVX

SEQ ID NO: 6389 - protein, 20 aa, Artificial Sequence
  Cyclic GFR-binding peptide
  MOD_RES (14)..(15): Xaa is C or S
KYLVSIPSLQTPAXXPKPVT

SEQ ID NO: 6390 - protein, 27 aa, Artificial Sequence
  Cyclic GFR-binding peptide
  MOD_RES (21)..(22): Xaa is C or S
IVNNSSDLYLVSIASLKTPAXXAKPVA

SEQ ID NO: 6391 - protein, 21 aa, Artificial Sequence
  Cyclic GFR-binding peptide
  MOD_RES (15)..(16): Xaa is C or S
VYYLISTASLDQPVXXPSASA

SEQ ID NO: 6392 - protein, 25 aa, Artificial Sequence
  Cyclic GFR-binding peptide
  MOD_RES (19)..(20): Xaa is C or S
KENEDKYLMSIPSLETPVXXAKPIK

SEQ ID NO: 6393 - protein, 27 aa, Artificial Sequence
  Cyclic GFR-binding peptide
  MOD_RES (21)..(22): Xaa is C or S
IVNSSDDYYLVSTASLQTPAXXPKPVT

SEQ ID NO: 6394 - protein, 16 aa, Artificial Sequence
  Cyclic GFR-binding peptide
  MOD_RES (16)..(16): Xaa is C or S
LYLVSIASLQVQTPRX

SEQ ID NO: 6395 - protein, 19 aa, Artificial Sequence
  Cyclic GFR-binding peptide
  MOD_RES (14)..(15): Xaa is C or S
LYLVSIASLKTPAXXAKPV

SEQ ID NO: 6396 - protein, 16 aa, Artificial Sequence
  Cyclic GFR-binding peptide
VKPKRGVYYLISTASL

SEQ ID NO: 6397 - protein, 20 aa, Artificial Sequence
  Cyclic GFR-binding peptide
  MOD_RES (14)..(15): Xaa is C or S
KYLVSIPSLKTPAXXAKPVA

SEQ ID NO: 6398 - protein, 27 aa, Artificial Sequence
  Cyclic GFR-binding peptide
  MOD_RES (21)..(22): Xaa is C or S
VVKDYEDFYLMSIANLETPVXXAKPIS

SEQ ID NO: 6399 - protein, 20 aa, Artificial Sequence
  Cyclic GFR-binding peptide
  MOD_RES (16)..(16): Xaa is C or S
FYLVSIANLQVQTPRXQVNR

SEQ ID NO: 6400 - protein, 19 aa, Artificial Sequence
  Cyclic GFR-binding peptide
VKPTRGVKYLISIPSLDQP

SEQ ID NO: 6401 - protein, 23 aa, Artificial Sequence
  Cyclic GFR-binding peptide
  MOD_RES (19)..(19): Xaa is C or S
VIEFYLVSIANLQVQTPRXQVNR

SEQ ID NO: 6402 - protein, 19 aa, Artificial Sequence
  Cyclic GFR-binding peptide
  MOD_RES (14)..(15): Xaa is C or S
LYLISIASLDQPVXXPSAS

SEQ ID NO: 6403 - protein, 26 aa, Artificial Sequence
  Cyclic GFR-binding peptide
  MOD_RES (20)..(21): Xaa is C or S
KPKRGVYYLISTASLAQPVXXPAASA

SEQ ID NO: 6404 - protein, 28 aa, Artificial Sequence
  Cyclic GFR-binding peptide
  MOD_RES (24)..(24): Xaa is C or S
IPKKRVIELYLVSIASLQVQTPRXQVNR

SEQ ID NO: 6405 - protein, 16 aa, Artificial Sequence
  Cyclic GFR-binding peptide
IKPTKGILYLISIASL

SEQ ID NO: 6406 - protein, 24 aa, Artificial Sequence
  Cyclic GFR-binding peptide
  MOD_RES (18)..(19): Xaa is C or S
GMDDFYLVSIANLKTPVXXAKGVK

SEQ ID NO: 6407 - protein, 26 aa, Artificial Sequence
  Cyclic GFR-binding peptide
  MOD_RES (20)..(21): Xaa is C or S
KPKRGVKYLISIPSLAQPVXXPAASA

SEQ ID NO: 6408 - protein, 25 aa, Artificial Sequence
  Cyclic GFR-binding peptide
  MOD_RES (21)..(21): Xaa is C or S
KRVIEYYLVSTASLQVQTPRXQVNR

SEQ ID NO: 6409 - protein, 19 aa, Artificial Sequence
  Cyclic GFR-binding peptide
  MOD_RES (14)..(15): Xaa is C or S
KYLISIPSLDQSVXXPSAS

SEQ ID NO: 6410 - protein, 17 aa, Artificial Sequence
  Cyclic GFR-binding peptide
  MOD_RES (14)..(14): Xaa is C or S
LYLVSIASLKTPAXTPK

SEQ ID NO: 6411 - protein, 27 aa, Artificial Sequence
  Cyclic GFR-binding peptide
  MOD_RES (21)..(22): Xaa is C or S
VVKENEDKYLMSIPSLETPVXXAKPIK

SEQ ID NO: 6412 - protein, 19 aa, Artificial Sequence
  Cyclic GFR-binding peptide
IVNSSDDKYLVSIPSLKTP

SEQ ID NO: 6413 - protein, 17 aa, Artificial Sequence
  Cyclic GFR-binding peptide
VKPKRGVKYLISIPSLA

SEQ ID NO: 6414 - protein, 20 aa, Artificial Sequence
  Cyclic GFR-binding peptide
  MOD_RES (14)..(15): Xaa is C or S
FYLMSIANLETPVXXAKPIK

SEQ ID NO: 6415 - protein, 24 aa, Artificial Sequence
  Cyclic GFR-binding peptide
  MOD_RES (18)..(19): Xaa is C or S
TKGIYYLISTASLDQSVXXPSASA

SEQ ID NO: 6416 - protein, 18 aa, Artificial Sequence
  Cyclic GFR-binding peptide
  MOD_RES (16)..(16): Xaa is C or S
FYLVSIANLQVQTPRXQV

SEQ ID NO: 6417 - protein, 27 aa, Artificial Sequence
  Cyclic GFR-binding peptide
  MOD_RES (23)..(23): Xaa is C or S
PKKRVIEFYLVSIANLQVQTPRXQVNR

SEQ ID NO: 6418 - protein, 22 aa, Artificial Sequence
  Cyclic GFR-binding peptide
  MOD_RES (16)..(17): Xaa is C or S
GVKYLISIPSLAQPVXXPAASA

SEQ ID NO: 6419 - protein, 17 aa, Artificial Sequence
  Cyclic GFR-binding peptide
  MOD_RES (14)..(15): Xaa is C or S
LYLVSIASLKTPAXXPK

SEQ ID NO: 6420 - protein, 21 aa, Artificial Sequence
  Cyclic GFR-binding peptide
  MOD_RES (15)..(16): Xaa is C or S
DLYLVSIASLKTPAXXPKPVY

SEQ ID NO: 6421 - protein, 19 aa, Artificial Sequence
  Cyclic GFR-binding peptide
IVNSSDDKYLVSIPSLQTP

SEQ ID NO: 6422 - protein, 18 aa, Artificial Sequence
  Cyclic GFR-binding peptide
  MOD_RES (14)..(15): Xaa is C or S
LYLVSIASLKTPAXXAKP

SEQ ID NO: 6423 - protein, 22 aa, Artificial Sequence
  Cyclic GFR-binding peptide
  MOD_RES (16)..(17): Xaa is C or S
EDKYLMSIPSLETPVXXAKPIK

SEQ ID NO: 6424 - protein, 23 aa, Artificial Sequence
  Cyclic GFR-binding peptide
  MOD_RES (17)..(18): Xaa is C or S
RGVYYLISTASLAQPVXXPAASA

SEQ ID NO: 6425 - protein, 27 aa, Artificial Sequence
  Cyclic GFR-binding peptide
  MOD_RES (23)..(23): Xaa is C or S
PKKRVIELYLVSIASLQVQTPRXQVNR

SEQ ID NO: 6426 - protein, 27 aa, Artificial Sequence
  Cyclic GFR-binding peptide
  MOD_RES (21)..(22): Xaa is C or S
VKPKRGVKYLISIPSLAQPVXXPAASA

SEQ ID NO: 6427 - protein, 15 aa, Artificial Sequence
  Cyclic GFR-binding peptide
  MOD_RES (14)..(15): Xaa is C or S
FYLISIANLAQPVXX

SEQ ID NO: 6428 - protein, 21 aa, Artificial Sequence
  Cyclic GFR-binding peptide
  MOD_RES (15)..(16): Xaa is C or S
DKYLMSIPSLETPVXXAKPIK

SEQ ID NO: 6429 - protein, 13 aa, Artificial Sequence
  Cyclic GFR-binding peptide
LYLISIASLDQPV

SEQ ID NO: 6430 - protein, 13 aa, Artificial Sequence
  Cyclic GFR-binding peptide
FYLISIANLAQPV

SEQ ID NO: 6431 - protein, 19 aa, Artificial Sequence
  Cyclic GFR-binding peptide
VKPTRGVLYLISIASLDQP

SEQ ID NO: 6432 - protein, 24 aa, Artificial Sequence
  Cyclic GFR-binding peptide
  MOD_RES (18)..(19): Xaa is C or S
TRGVKYLISIPSLDQPVXXPSASA

SEQ ID NO: 6433 - protein, 19 aa, Artificial Sequence
  Cyclic GFR-binding peptide
VKPKRGVKYLISIPSLAQP

SEQ ID NO: 6434 - protein, 14 aa, Artificial Sequence
  Cyclic GFR-binding peptide
  MOD_RES (14)..(14): Xaa is C or S
YYLMSTASLETPVX

SEQ ID NO: 6435 - protein, 26 aa, Artificial Sequence
  Cyclic GFR-binding peptide
  MOD_RES (22)..(22): Xaa is C or S
KKRVIEYYLVSTASLQVQTPRXQVNR

SEQ ID NO: 6436 - protein, 17 aa, Artificial Sequence
  Cyclic GFR-binding peptide
VKPKRGVFYLISIANLA

SEQ ID NO: 6437 - protein, 25 aa, Artificial Sequence
  Cyclic GFR-binding peptide
  MOD_RES (19)..(19): Xaa is C or S
NSSDDLYLVSIASLKTPAXTPKTVH

SEQ ID NO: 6438 - protein, 16 aa, Artificial Sequence
  Cyclic GFR-binding peptide
  MOD_RES (14)..(15): Xaa is C or S
YYLISTASLDQPVXXP

SEQ ID NO: 6439 - protein, 25 aa, Artificial Sequence
  Cyclic GFR-binding peptide
  MOD_RES (19)..(20): Xaa is C or S
PTRGVKYLISIPSLDQPVXXPSASA

SEQ ID NO: 6440 - protein, 16 aa, Artificial Sequence
  Cyclic GFR-binding peptide
VKPTRGVYYLISTASL

SEQ ID NO: 6441 - protein, 21 aa, Artificial Sequence
  Cyclic GFR-binding peptide
  MOD_RES (15)..(16): Xaa is C or S
VLYLISIASLDQPVXXPSASA

SEQ ID NO: 6442 - protein, 18 aa, Artificial Sequence
  Cyclic GFR-binding peptide
TPVGMDDYYLVSTASLKT

SEQ ID NO: 6443 - protein, 18 aa, Artificial Sequence
  Cyclic GFR-binding peptide
  MOD_RES (14)..(15): Xaa is C or S
YYLVSTASLKTPVXXAKG

SEQ ID NO: 6444 - protein, 27 aa, Artificial Sequence
  Cyclic GFR-binding peptide
  MOD_RES (21)..(22): Xaa is C or S
IVNNSSDKYLVSIPSLKTPAXXAKPVA

SEQ ID NO: 6445 - protein, 16 aa, Artificial Sequence
  Cyclic GFR-binding peptide
  MOD_RES (14)..(15): Xaa is C or S
YYLISTASLDQSVXXP

SEQ ID NO: 6446 - protein, 25 aa, Artificial Sequence
  Cyclic GFR-binding peptide
  MOD_RES (19)..(20): Xaa is C or S
KENEDFYLMSIANLETPVXXAKPIK

SEQ ID NO: 6447 - protein, 20 aa, Artificial Sequence
  Cyclic GFR-binding peptide
  MOD_RES (14)..(15): Xaa is C or S
KYLISIPSLDQPVXXPSASA

SEQ ID NO: 6448 - protein, 24 aa, Artificial Sequence
  Cyclic GFR-binding peptide
  MOD_RES (18)..(19): Xaa is C or S
DYEDYYLMSTASLETPVXXAKPIS

SEQ ID NO: 6449 - protein, 24 aa, Artificial Sequence
  Cyclic GFR-binding peptide
  MOD_RES (18)..(18): Xaa is C or S
SSDDKYLVSIPSLKTPAXTPKTVH

SEQ ID NO: 6450 - protein, 19 aa, Artificial Sequence
  Cyclic GFR-binding peptide
  MOD_RES (14)..(15): Xaa is C or S
FYLVSIANLKTPVXXAKGV

SEQ ID NO: 6451 - protein, 26 aa, Artificial Sequence
  Cyclic GFR-binding peptide
  MOD_RES (22)..(22): Xaa is C or S
KKRVIEFYLVSIANLQVQTPRXQVNR

SEQ ID NO: 6452 - protein, 26 aa, Artificial Sequence
  Cyclic GFR-binding peptide
  MOD_RES (20)..(21): Xaa is C or S
PVGMDDLYLVSIASLKTPVXXAKGVK

SEQ ID NO: 6453 - protein, 26 aa, Artificial Sequence
  Cyclic GFR-binding peptide
  MOD_RES (20)..(21): Xaa is C or S
VNNSSDLYLVSIASLKTPAXXAKPVA

SEQ ID NO: 6454 - protein, 21 aa, Artificial Sequence
  Cyclic GFR-binding peptide
  MOD_RES (15)..(16): Xaa is C or S
VKYLISIPSLAQPVXXPAASA

SEQ ID NO: 6455 - protein, 18 aa, Artificial Sequence
  Cyclic GFR-binding peptide
  MOD_RES (14)..(15): Xaa is C or S
LYLVSIASLQTPAXXPKP

SEQ ID NO: 6456 - protein, 15 aa, Artificial Sequence
  Cyclic GFR-binding peptide
  MOD_RES (14)..(15): Xaa is C or S
LYLVSIASLQTPAXX

SEQ ID NO: 6457 - protein, 20 aa, Artificial Sequence
  Cyclic GFR-binding peptide
  MOD_RES (14)..(15): Xaa is C or S
FYLISIANLAQPVXXPAASA

SEQ ID NO: 6458 - protein, 13 aa, Artificial Sequence
  Cyclic GFR-binding peptide
LYLVSIASLQVQT

SEQ ID NO: 6459 - protein, 19 aa, Artificial Sequence
  Cyclic GFR-binding peptide
  MOD_RES (14)..(14): Xaa is C or S
LYLVSIASLKTPAXTPKTV

SEQ ID NO: 6460 - protein, 20 aa, Artificial Sequence
  Cyclic GFR-binding peptide
  MOD_RES (14)..(15): Xaa is C or S
LYLISIASLAQPVXXPAASA

SEQ ID NO: 6461 - protein, 13 aa, Artificial Sequence
  Cyclic GFR-binding peptide
FYLVSIANLQVQT

SEQ ID NO: 6462 - protein, 25 aa, Artificial Sequence
  Cyclic GFR-binding peptide
  MOD_RES (19)..(20): Xaa is C or S
NSSDDYYLVSTASLKTPAXXPKPVY

SEQ ID NO: 6463 - protein, 24 aa, Artificial Sequence
  Cyclic GFR-binding peptide
  MOD_RES (18)..(19): Xaa is C or S
NSSDLYLVSIASLKTPAXXAKPVA

SEQ ID NO: 6464 - protein, 15 aa, Artificial Sequence
  Cyclic GFR-binding peptide
VKPTRGVFYLISIAN

SEQ ID NO: 6465 - protein, 15 aa, Artificial Sequence
  Cyclic GFR-binding peptide
IVNSSDDLYLVSIAS

SEQ ID NO: 6466 - protein, 21 aa, Artificial Sequence
  Cyclic GFR-binding peptide
  MOD_RES (15)..(16): Xaa is C or S
DLYLVSIASLQTPAXXPKPVT

SEQ ID NO: 6467 - protein, 17 aa, Artificial Sequence
  Cyclic GFR-binding peptide
VKPTRGVLYLISIASLD

SEQ ID NO: 6468 - protein, 19 aa, Artificial Sequence
  Cyclic GFR-binding peptide
IKPTKGIYYLISTASLDQS

SEQ ID NO: 6469 - protein, 27 aa, Artificial Sequence
  Cyclic GFR-binding peptide
  MOD_RES (21)..(22): Xaa is C or S
VKPKRGVFYLISIANLAQPVXXPAASA

SEQ ID NO: 6470 - protein, 25 aa, Artificial Sequence
  Cyclic GFR-binding peptide
  MOD_RES (19)..(20): Xaa is C or S
NSSDDLYLVSIASLQTPAXXPKPVT

SEQ ID NO: 6471 - protein, 27 aa, Artificial Sequence
  Cyclic GFR-binding peptide
  MOD_RES (23)..(23): Xaa is C or S
PKKRVIEKYLVSIPSLQVQTPRXQVNR

SEQ ID NO: 6472 - protein, 26 aa, Artificial Sequence
  Cyclic GFR-binding peptide
  MOD_RES (20)..(21): Xaa is C or S
KPTKGIYYLISTASLDQSVXXPSASA

SEQ ID NO: 6473 - protein, 18 aa, Artificial Sequence
  Cyclic GFR-binding peptide
  MOD_RES (14)..(14): Xaa is C or S
LYLVSIASLKTPAXTPKT

SEQ ID NO: 6474 - protein, 20 aa, Artificial Sequence
  Cyclic GFR-binding peptide
  MOD_RES (16)..(16): Xaa is C or S
LYLVSIASLQVQTPRXQVNR

SEQ ID NO: 6475 - protein, 23 aa, Artificial Sequence
  Cyclic GFR-binding peptide
  MOD_RES (17)..(18): Xaa is C or S
SSDKYLVSIPSLKTPAXXAKPVA

SEQ ID NO: 6476 - protein, 15 aa, Artificial Sequence
  Cyclic GFR-binding peptide
LYLVSIASLQVQTPR

SEQ ID NO: 6477 - protein, 21 aa, Artificial Sequence
  Cyclic GFR-binding peptide
  MOD_RES (15)..(16): Xaa is C or S
VFYLISIANLAQPVXXPAASA

SEQ ID NO: 6478 - protein, 26 aa, Artificial Sequence
  Cyclic GFR-binding peptide
  MOD_RES (20)..(21): Xaa is C or S
KPTKGIFYLISIANLDQSVXXPSASA

SEQ ID NO: 6479 - protein, 17 aa, Artificial Sequence
  Cyclic GFR-binding peptide
  MOD_RES (14)..(15): Xaa is C or S
LYLVSIASLQTPAXXPK

SEQ ID NO: 6480 - protein, 23 aa, Artificial Sequence
  Cyclic GFR-binding peptide
  MOD_RES (17)..(17): Xaa is C or S
SDDKYLVSIPSLKTPAXTPKTVH

SEQ ID NO: 6481 - protein, 17 aa, Artificial Sequence
  Cyclic GFR-binding peptide
  MOD_RES (14)..(15): Xaa is C or S
YYLVSTASLKTPVXXAK

SEQ ID NO: 6482 - protein, 26 aa, Artificial Sequence
  Cyclic GFR-binding peptide
  MOD_RES (20)..(21): Xaa is C or S
VNSSDDLYLVSIASLKTPAXXPKPVY

SEQ ID NO: 6483 - protein, 22 aa, Artificial Sequence
  Cyclic GFR-binding peptide
  MOD_RES (16)..(17): Xaa is C or S
DDKYLVSIPSLKTPAXXPKPVY

SEQ ID NO: 6484 - protein, 19 aa, Artificial Sequence
  Cyclic GFR-binding peptide
VVKENEDFYLMSIANLETP

SEQ ID NO: 6485 - protein, 27 aa, Artificial Sequence
  Cyclic GFR-binding peptide
  MOD_RES (21)..(22): Xaa is C or S
VVKENEDFYLMSIANLETPVXXAKPIK

SEQ ID NO: 6486 - protein, 15 aa, Artificial Sequence
  Cyclic GFR-binding peptide
  MOD_RES (14)..(15): Xaa is C or S
KYLVSIPSLKTPAXX

SEQ ID NO: 6487 - protein, 23 aa, Artificial Sequence
  Cyclic GFR-binding peptide
  MOD_RES (17)..(18): Xaa is C or S
KGIKYLISIPSLDQSVXXPSASA

SEQ ID NO: 6488 - protein, 19 aa, Artificial Sequence
  Cyclic GFR-binding peptide
FIPKKRVIEYYLVSTASLQ

SEQ ID NO: 6489 - protein, 24 aa, Artificial Sequence
  Cyclic GFR-binding peptide
  MOD_RES (18)..(19): Xaa is C or S
SSDDLYLVSIASLQTPAXXPKPVT

SEQ ID NO: 6490 - protein, 25 aa, Artificial Sequence
  Cyclic GFR-binding peptide
  MOD_RES (19)..(20): Xaa is C or S
KDYEDFYLMSIANLETPVXXAKPIS

SEQ ID NO: 6491 - protein, 16 aa, Artificial Sequence
  Cyclic GFR-binding peptide
  MOD_RES (14)..(15): Xaa is C or S
KYLVSIPSLKTPAXXP

SEQ ID NO: 6492 - protein, 23 aa, Artificial Sequence
  Cyclic GFR-binding peptide
  MOD_RES (17)..(18): Xaa is C or S
RGVFYLISIANLDQPVXXPSASA

SEQ ID NO: 6493 - protein, 19 aa, Artificial Sequence
  Cyclic GFR-binding peptide
  MOD_RES (14)..(15): Xaa is C or S
KYLISIPSLAQPVXXPAAS

SEQ ID NO: 6494 - protein, 26 aa, Artificial Sequence
  Cyclic GFR-binding peptide
  MOD_RES (20)..(20): Xaa is C or S
VNSSDDLYLVSIASLKTPAXTPKTVH

SEQ ID NO: 6495 - protein, 23 aa, Artificial Sequence
  Cyclic GFR-binding peptide
  MOD_RES (17)..(18): Xaa is C or S
NEDFYLMSIANLETPVXXAKPIK

SEQ ID NO: 6496 - protein, 19 aa, Artificial Sequence
  Cyclic GFR-binding peptide
  MOD_RES (14)..(15): Xaa is C or S
FYLISIANLAQPVXXPAAS

SEQ ID NO: 6497 - protein, 13 aa, Artificial Sequence
  Cyclic GFR-binding peptide
KYLISIPSLDQPV

SEQ ID NO: 6498 - protein, 19 aa, Artificial Sequence
  Cyclic GFR-binding peptide
  MOD_RES (16)..(16): Xaa is C or S
YYLVSTASLQVQTPRXQVN

SEQ ID NO: 6499 - protein, 25 aa, Artificial Sequence
  Cyclic GFR-binding peptide
  MOD_RES (19)..(20): Xaa is C or S
KDYEDYYLMSTASLETPVXXAKPIS

SEQ ID NO: 6500 - protein, 14 aa, Artificial Sequence
  Cyclic GFR-binding peptide
  MOD_RES (14)..(14): Xaa is C or S
KYLVSIPSLQTPAX

SEQ ID NO: 6501 - protein, 15 aa, Artificial Sequence
  Cyclic GFR-binding peptide
VKPTRGVKYLISIPS

SEQ ID NO: 6502 - protein, 19 aa, Artificial Sequence
  Cyclic GFR-binding peptide
VKPKRGVLYLISIASLAQP

SEQ ID NO: 6503 - protein, 24 aa, Artificial Sequence
  Cyclic GFR-binding peptide
  MOD_RES (18)..(19): Xaa is C or S
ENEDYYLMSTASLETPVXXAKPIK

SEQ ID NO: 6504 - protein, 23 aa, Artificial Sequence
  Cyclic GFR-binding peptide
  MOD_RES (17)..(18): Xaa is C or S
SDDLYLVSIASLQTPAXXPKPVT

SEQ ID NO: 6505 - protein, 22 aa, Artificial Sequence
  Cyclic GFR-binding peptide
  MOD_RES (16)..(17): Xaa is C or S
DDKYLVSIPSLQTPAXXPKPVT

SEQ ID NO: 6506 - protein, 16 aa, Artificial Sequence
  Cyclic GFR-binding peptide
VVKDYEDFYLMSIANL

SEQ ID NO: 6507 - protein, 18 aa, Artificial Sequence
  Cyclic GFR-binding peptide
VVKENEDKYLMSIPSLET

SEQ ID NO: 6508 - protein, 15 aa, Artificial Sequence
  Cyclic GFR-binding peptide
YYLVSTASLQVQTPR

SEQ ID NO: 6509 - protein, 14 aa, Artificial Sequence
  Cyclic GFR-binding peptide
YYLVSTASLQVQTP

SEQ ID NO: 6510 - protein, 19 aa, Artificial Sequence
  Cyclic GFR-binding peptide
VKPTRGVYYLISTASLDQP

SEQ ID NO: 6511 - protein, 17 aa, Artificial Sequence
  Cyclic GFR-binding peptide
  MOD_RES (14)..(15): Xaa is C or S
YYLMSTASLETPVXXAK

SEQ ID NO: 6512 - protein, 17 aa, Artificial Sequence
  Cyclic GFR-binding peptide
FIPKKRVIELYLVSIAS

SEQ ID NO: 6513 - protein, 16 aa, Artificial Sequence
  Cyclic GFR-binding peptide
  MOD_RES (16)..(16): Xaa is C or S
KYLVSIPSLQVQTPRX

SEQ ID NO: 6514 - protein, 27 aa, Artificial Sequence
  Cyclic GFR-binding peptide
  MOD_RES (21)..(21): Xaa is C or S
IVNSSDDKYLVSIPSLKTPAXTPKTVH

SEQ ID NO: 6515 - protein, 28 aa, Artificial Sequence
  Cyclic GFR-binding peptide
  MOD_RES (24)..(24): Xaa is C or S
IPKKRVIEYYLVSTASLQVQTPRXQVNR

SEQ ID NO: 6516 - protein, 25 aa, Artificial Sequence
  Cyclic GFR-binding peptide
  MOD_RES (19)..(20): Xaa is C or S
NSSDDKYLVSIPSLKTPAXXPKPVY

SEQ ID NO: 6517 - protein, 21 aa, Artificial Sequence
  Cyclic GFR-binding peptide
  MOD_RES (17)..(17): Xaa is C or S
EYYLVSTASLQVQTPRXQVNR

SEQ ID NO: 6518 - protein, 18 aa, Artificial Sequence
  Cyclic GFR-binding peptide
VKPTRGVKYLISIPSLDQ

SEQ ID NO: 6519 - protein, 23 aa, Artificial Sequence
  Cyclic GFR-binding peptide
  MOD_RES (17)..(18): Xaa is C or S
SDDLYLVSIASLKTPAXXPKPVY

SEQ ID NO: 6520 - protein, 18 aa, Artificial Sequence
  Cyclic GFR-binding peptide
IVNSSDDLYLVSIASLKT

SEQ ID NO: 6521 - protein, 14 aa, Artificial Sequence
  Cyclic GFR-binding peptide
  MOD_RES (14)..(14): Xaa is C or S
LYLVSIASLKTPAX

SEQ ID NO: 6522 - protein, 19 aa, Artificial Sequence
  Cyclic GFR-binding peptide
  MOD_RES (14)..(15): Xaa is C or S
LYLVSIASLKTPAXXPKPV

SEQ ID NO: 6523 - protein, 19 aa, Artificial Sequence
  Cyclic GFR-binding peptide
  MOD_RES (14)..(15): Xaa is C or S
FYLMSIANLETPVXXAKPI

SEQ ID NO: 6524 - protein, 17 aa, Artificial Sequence
  Cyclic GFR-binding peptide
  MOD_RES (14)..(15): Xaa is C or S
LYLISIASLDQPVXXPS

SEQ ID NO: 6525 - protein, 27 aa, Artificial Sequence
  Cyclic GFR-binding peptide
  MOD_RES (23)..(23): Xaa is C or S
PKKRVIEYYLVSTASLQVQTPRXQVNR

SEQ ID NO: 6526 - protein, 14 aa, Artificial Sequence
  Cyclic GFR-binding peptide
  MOD_RES (14)..(14): Xaa is C or S
YYLVSTASLKTPVX

SEQ ID NO: 6527 - protein, 20 aa, Artificial Sequence
  Cyclic GFR-binding peptide
  MOD_RES (14)..(15): Xaa is C or S
KYLMSIPSLETPVXXAKPIS

SEQ ID NO: 6528 - protein, 26 aa, Artificial Sequence
  Cyclic GFR-binding peptide
  MOD_RES (20)..(21): Xaa is C or S
VKDYEDYYLMSTASLETPVXXAKPIS

SEQ ID NO: 6529 - protein, 20 aa, Artificial Sequence
  Cyclic GFR-binding peptide
  MOD_RES (14)..(15): Xaa is C or S
FYLMSIANLETPVXXAKPIS

SEQ ID NO: 6530 - protein, 18 aa, Artificial Sequence
  Cyclic GFR-binding peptide
IVNSSDDLYLVSIASLQT

SEQ ID NO: 6531 - protein, 19 aa, Artificial Sequence
  Cyclic GFR-binding peptide
TPVGMDDLYLVSIASLKTP

SEQ ID NO: 6532 - protein, 15 aa, Artificial Sequence
  Cyclic GFR-binding peptide
  MOD_RES (14)..(15): Xaa is C or S
LYLISIASLDQPVXX

SEQ ID NO: 6533 - protein, 19 aa, Artificial Sequence
  Cyclic GFR-binding peptide
  MOD_RES (14)..(15): Xaa is C or S
KYLISIPSLDQPVXXPSAS

SEQ ID NO: 6534 - protein, 17 aa, Artificial Sequence
  Cyclic GFR-binding peptide
  MOD_RES (14)..(15): Xaa is C or S
LYLVSIASLKTPVXXAK

SEQ ID NO: 6535 - protein, 19 aa, Artificial Sequence
  Cyclic GFR-binding peptide
IKPTKGIKYLISIPSLDQS

SEQ ID NO: 6536 - protein, 18 aa, Artificial Sequence
  Cyclic GFR-binding peptide
VKPTRGVFYLISIANLDQ

SEQ ID NO: 6537 - protein, 20 aa, Artificial Sequence
  Cyclic GFR-binding peptide
  MOD_RES (14)..(15): Xaa is C or S
KYLVSIPSLKTPAXXPKPVY

SEQ ID NO: 6538 - protein, 16 aa, Artificial Sequence
  Cyclic GFR-binding peptide
IVNNSSDFYLVSIANL

SEQ ID NO: 6539 - protein, 26 aa, Artificial Sequence
  Cyclic GFR-binding peptide
  MOD_RES (22)..(22): Xaa is C or S
KKRVIELYLVSIASLQVQTPRXQVNR

SEQ ID NO: 6540 - protein, 22 aa, Artificial Sequence
  Cyclic GFR-binding peptide
  MOD_RES (16)..(17): Xaa is C or S
GVLYLISIASLDQPVXXPSASA

SEQ ID NO: 6541 - protein, 16 aa, Artificial Sequence
  Cyclic GFR-binding peptide
  MOD_RES (14)..(15): Xaa is C or S
FYLVSIANLKTPAXXA

SEQ ID NO: 6542 - protein, 16 aa, Artificial Sequence
  Cyclic GFR-binding peptide
  MOD_RES (14)..(14): Xaa is C or S
YYLVSTASLKTPAXTP

SEQ ID NO: 6543 - protein, 19 aa, Artificial Sequence
  Cyclic GFR-binding peptide
FIPKKRVIEKYLVSIPSLQ

SEQ ID NO: 6544 - protein, 19 aa, Artificial Sequence
  Cyclic GFR-binding peptide
VKPTRGVFYLISIANLDQP

SEQ ID NO: 6545 - protein, 15 aa, Artificial Sequence
  Cyclic GFR-binding peptide
  MOD_RES (14)..(15): Xaa is C or S
LYLVSIASLKTPVXX

SEQ ID NO: 6546 - protein, 21 aa, Artificial Sequence
  Cyclic GFR-binding peptide
  MOD_RES (15)..(16): Xaa is C or S
VLYLISIASLAQPVXXPAASA

SEQ ID NO: 6547 - protein, 20 aa, Artificial Sequence
  Cyclic GFR-binding peptide
FIPKKRVIEFYLVSIANLQV

SEQ ID NO: 6548 - protein, 14 aa, Artificial Sequence
  Cyclic GFR-binding peptide
  MOD_RES (14)..(14): Xaa is C or S
LYLISIASLDQSVX

SEQ ID NO: 6549 - protein, 15 aa, Artificial Sequence
  Cyclic GFR-binding peptide
  MOD_RES (14)..(15): Xaa is C or S
FYLVSIANLKTPVXX

SEQ ID NO: 6550 - protein, 19 aa, Artificial Sequence
  Cyclic GFR-binding peptide
  MOD_RES (14)..(15): Xaa is C or S
YYLVSTASLKTPVXXAKGV

SEQ ID NO: 6551 - protein, 22 aa, Artificial Sequence
  Cyclic GFR-binding peptide
  MOD_RES (16)..(17): Xaa is C or S
EDYYLMSTASLETPVXXAKPIS

SEQ ID NO: 6552 - protein, 20 aa, Artificial Sequence
  Cyclic GFR-binding peptide
  MOD_RES (14)..(15): Xaa is C or S
YYLISTASLDQPVXXPSASA

SEQ ID NO: 6553 - protein, 16 aa, Artificial Sequence
  Cyclic GFR-binding peptide
  MOD_RES (14)..(15): Xaa is C or S
LYLISIASLDQPVXXP

SEQ ID NO: 6554 - protein, 15 aa, Artificial Sequence
  Cyclic GFR-binding peptide
  MOD_RES (14)..(15): Xaa is C or S
YYLVSTASLKTPVXX

SEQ ID NO: 6555 - protein, 21 aa, Artificial Sequence
  Cyclic GFR-binding peptide
  MOD_RES (15)..(16): Xaa is C or S
DYYLVSTASLKTPAXXPKPVY

SEQ ID NO: 6556 - protein, 21 aa, Artificial Sequence
  Cyclic GFR-binding peptide
  MOD_RES (15)..(16): Xaa is C or S
DKYLVSIPSLQTPAXXPKPVT

SEQ ID NO: 6557 - protein, 19 aa, Artificial Sequence
  Cyclic GFR-binding peptide
  MOD_RES (14)..(15): Xaa is C or S
KYLVSIPSLQTPAXXPKPV

SEQ ID NO: 6558 - protein, 20 aa, Artificial Sequence
  Cyclic GFR-binding peptide
  MOD_RES (14)..(15): Xaa is C or S
LYLISIASLDQSVXXPSASA

SEQ ID NO: 6559 - protein, 18 aa, Artificial Sequence
  Cyclic GFR-binding peptide
  MOD_RES (14)..(15): Xaa is C or S
FYLISIANLAQPVXXPAA

SEQ ID NO: 6560 - protein, 17 aa, Artificial Sequence
  Cyclic GFR-binding peptide
VKPKRGVLYLISIASLA

SEQ ID NO: 6561 - protein, 16 aa, Artificial Sequence
  Cyclic GFR-binding peptide
  MOD_RES (14)..(14): Xaa is C or S
KYLVSIPSLKTPAXTP

SEQ ID NO: 6562 - protein, 18 aa, Artificial Sequence
  Cyclic GFR-binding peptide
IVNSSDDKYLVSIPSLQT

SEQ ID NO: 6563 - protein, 15 aa, Artificial Sequence
  Cyclic GFR-binding peptide
  MOD_RES (14)..(15): Xaa is C or S
FYLISIANLDQSVXX

SEQ ID NO: 6564 - protein, 27 aa, Artificial Sequence
  Cyclic GFR-binding peptide
  MOD_RES (21)..(22): Xaa is C or S
VVKENEDYYLMSTASLETPVXXAKPIK

SEQ ID NO: 6565 - protein, 19 aa, Artificial Sequence
  Cyclic GFR-binding peptide
VVKENEDYYLMSTASLETP

SEQ ID NO: 6566 - protein, 15 aa, Artificial Sequence
  Cyclic GFR-binding peptide
VKPTRGVLYLISIAS

SEQ ID NO: 6567 - protein, 21 aa, Artificial Sequence
  Cyclic GFR-binding peptide
  MOD_RES (15)..(16): Xaa is C or S
DKYLMSIPSLETPVXXAKPIS

SEQ ID NO: 6568 - protein, 19 aa, Artificial Sequence
  Cyclic GFR-binding peptide
  MOD_RES (14)..(15): Xaa is C or S
KYLVSIPSLKTPAXXPKPV

SEQ ID NO: 6569 - protein, 24 aa, Artificial Sequence
  Cyclic GFR-binding peptide
  MOD_RES (18)..(19): Xaa is C or S
TKGIFYLISIANLDQSVXXPSASA

SEQ ID NO: 6570 - protein, 25 aa, Artificial Sequence
  Cyclic GFR-binding peptide
  MOD_RES (19)..(20): Xaa is C or S
KENEDYYLMSTASLETPVXXAKPIK

SEQ ID NO: 6571 - protein, 20 aa, Artificial Sequence
  Cyclic GFR-binding peptide
FIPKKRVIELYLVSIASLQV

SEQ ID NO: 6572 - protein, 13 aa, Artificial Sequence
  Cyclic GFR-binding peptide
YYLISTASLDQPV

SEQ ID NO: 6573 - protein, 27 aa, Artificial Sequence
  Cyclic GFR-binding peptide
  MOD_RES (21)..(21): Xaa is C or S
IVNSSDDLYLVSIASLKTPAXTPKTVH

SEQ ID NO: 6574 - protein, 20 aa, Artificial Sequence
  Cyclic GFR-binding peptide
  MOD_RES (14)..(15): Xaa is C or S
FYLISIANLDQSVXXPSASA

SEQ ID NO: 6575 - protein, 21 aa, Artificial Sequence
  Cyclic GFR-binding peptide
  MOD_RES (15)..(16): Xaa is C or S
ILYLISIASLDQSVXXPSASA

SEQ ID NO: 6576 - protein, 17 aa, Artificial Sequence
  Cyclic GFR-binding peptide
VKPTRGVYYLISTASLD

SEQ ID NO: 6577 - protein, 14 aa, Artificial Sequence
  Cyclic GFR-binding peptide
  MOD_RES (14)..(14): Xaa is C or S
LYLVSIASLQTPAX

SEQ ID NO: 6578 - protein, 18 aa, Artificial Sequence
  Cyclic GFR-binding peptide
  MOD_RES (14)..(15): Xaa is C or S
FYLISIANLDQPVXXPSA

SEQ ID NO: 6579 - protein, 20 aa, Artificial Sequence
  Cyclic GFR-binding peptide
  MOD_RES (14)..(15): Xaa is C or S
KYLISIPSLDQSVXXPSASA

SEQ ID NO: 6580 - protein, 15 aa, Artificial Sequence
  Cyclic GFR-binding peptide
  MOD_RES (14)..(15): Xaa is C or S
YYLMSTASLETPVXX

SEQ ID NO: 6581 - protein, 18 aa, Artificial Sequence
  Cyclic GFR-binding peptide
IVNSSDDKYLVSIPSLKT

SEQ ID NO: 6582 - protein, 24 aa, Artificial Sequence
  Cyclic GFR-binding peptide
  MOD_RES (18)..(19): Xaa is C or S
TRGVYYLISTASLDQPVXXPSASA

SEQ ID NO: 6583 - protein, 13 aa, Artificial Sequence
  Cyclic GFR-binding peptide
KYLISIPSLDQSV

SEQ ID NO: 6584 - protein, 16 aa, Artificial Sequence
  Cyclic GFR-binding peptide
  MOD_RES (14)..(15): Xaa is C or S
FYLISIANLDQPVXXP

SEQ ID NO: 6585 - protein, 14 aa, Artificial Sequence
  Cyclic GFR-binding peptide
  MOD_RES (14)..(14): Xaa is C or S
YYLVSTASLQTPAX

SEQ ID NO: 6586 - protein, 16 aa, Artificial Sequence
  Cyclic GFR-binding peptide
  MOD_RES (16)..(16): Xaa is C or S
YYLVSTASLQVQTPRX

SEQ ID NO: 6587 - protein, 16 aa, Artificial Sequence
  Cyclic GFR-binding peptide
VVKDYEDKYLMSIPSL

SEQ ID NO: 6588 - protein, 19 aa, Artificial Sequence
  Cyclic GFR-binding peptide
IKPTKGILYLISIASLDQS

SEQ ID NO: 6589 - protein, 18 aa, Artificial Sequence
  Cyclic GFR-binding peptide
IKPTKGIKYLISIPSLDQ

SEQ ID NO: 6590 - protein, 16 aa, Artificial Sequence
  Cyclic GFR-binding peptide
  MOD_RES (14)..(15): Xaa is C or S
KYLVSIPSLQTPAXXP

SEQ ID NO: 6591 - protein, 15 aa, Artificial Sequence
  Cyclic GFR-binding peptide
TPVGMDDFYLVSIAN

SEQ ID NO: 6592 - protein, 18 aa, Artificial Sequence
  Cyclic GFR-binding peptide
VVKENEDFYLMSIANLET

SEQ ID NO: 6593 - protein, 17 aa, Artificial Sequence
  Cyclic GFR-binding peptide
TPVGMDDYYLVSTASLK

SEQ ID NO: 6594 - protein, 19 aa, Artificial Sequence
  Cyclic GFR-binding peptide
IKPTKGIFYLISIANLDQS

SEQ ID NO: 6595 - protein, 20 aa, Artificial Sequence
  Cyclic GFR-binding peptide
  MOD_RES (14)..(14): Xaa is C or S
YYLVSTASLKTPAXTPKTVH

SEQ ID NO: 6596 - protein, 14 aa, Artificial Sequence
  Cyclic GFR-binding peptide
KYLVSIPSLQVQTP

SEQ ID NO: 6597 - protein, 16 aa, Artificial Sequence
  Cyclic GFR-binding peptide
  MOD_RES (14)..(15): Xaa is C or S
FYLISIANLAQPVXXP

SEQ ID NO: 6598 - protein, 14 aa, Artificial Sequence
  Cyclic GFR-binding peptide
  MOD_RES (14)..(14): Xaa is C or S
KYLVSIPSLKTPAX

SEQ ID NO: 6599 - protein, 22 aa, Artificial Sequence
  Cyclic GFR-binding peptide
  MOD_RES (16)..(17): Xaa is C or S
GIYYLISTASLDQSVXXPSASA

SEQ ID NO: 6600 - protein, 15 aa, Artificial Sequence
  Cyclic GFR-binding peptide
  MOD_RES (14)..(15): Xaa is C or S
LYLISIASLDQSVXX

SEQ ID NO: 6601 - protein, 27 aa, Artificial Sequence
  Cyclic GFR-binding peptide
  MOD_RES (21)..(22): Xaa is C or S
VKPTRGVYYLISTASLDQPVXXPSASA

SEQ ID NO: 6602 - protein, 15 aa, Artificial Sequence
  Cyclic GFR-binding peptide
VKPKRGVKYLISIPS

SEQ ID NO: 6603 - protein, 26 aa, Artificial Sequence
  Cyclic GFR-binding peptide
  MOD_RES (20)..(21): Xaa is C or S
KPTKGILYLISIASLDQSVXXPSASA

SEQ ID NO: 6604 - protein, 22 aa, Artificial Sequence
  Cyclic GFR-binding peptide
  MOD_RES (16)..(17): Xaa is C or S
GVFYLISIANLDQPVXXPSASA

SEQ ID NO: 6605 - protein, 22 aa, Artificial Sequence
  Cyclic GFR-binding peptide
  MOD_RES (16)..(16): Xaa is C or S
DDYYLVSTASLKTPAXTPKTVH

SEQ ID NO: 6606 - protein, 23 aa, Artificial Sequence
  Cyclic GFR-binding peptide
  MOD_RES (17)..(18): Xaa is C or S
KGIYYLISTASLDQSVXXPSASA

SEQ ID NO: 6607 - protein, 18 aa, Artificial Sequence
  Cyclic GFR-binding peptide
FIPKKRVIEYYLVSTASL

SEQ ID NO: 6608 - protein, 18 aa, Artificial Sequence
  Cyclic GFR-binding peptide
  MOD_RES (14)..(15): Xaa is C or S
YYLISTASLDQSVXXPSA

SEQ ID NO: 6609 - protein, 19 aa, Artificial Sequence
  Cyclic GFR-binding peptide
IVNNSSDKYLVSIPSLKTP

SEQ ID NO: 6610 - protein, 19 aa, Artificial Sequence
  Cyclic GFR-binding peptide
VVKDYEDKYLMSIPSLETP

SEQ ID NO: 6611 - protein, 18 aa, Artificial Sequence
  Cyclic GFR-binding peptide
  MOD_RES (14)..(15): Xaa is C or S
YYLMSTASLETPVXXAKP

SEQ ID NO: 6612 - protein, 17 aa, Artificial Sequence
  Cyclic GFR-binding peptide
  MOD_RES (14)..(15): Xaa is C or S
KYLVSIPSLKTPAXXAK

SEQ ID NO: 6613 - protein, 21 aa, Artificial Sequence
  Cyclic GFR-binding peptide
  MOD_RES (15)..(16): Xaa is C or S
DYYLVSTASLKTPVXXAKGVK

SEQ ID NO: 6614 - protein, 13 aa, Artificial Sequence
  Cyclic GFR-binding peptide
KYLISIPSLAQPV

SEQ ID NO: 6615 - protein, 13 aa, Artificial Sequence
  Cyclic GFR-binding peptide
YYLVSTASLQVQT

SEQ ID NO: 6616 - protein, 15 aa, Artificial Sequence
  Cyclic GFR-binding peptide
  MOD_RES (14)..(15): Xaa is C or S
KYLVSIPSLQTPAXX

SEQ ID NO: 6617 - protein, 19 aa, Artificial Sequence
  Cyclic GFR-binding peptide
  MOD_RES (14)..(15): Xaa is C or S
LYLISIASLAQPVXXPAAS

SEQ ID NO: 6618 - protein, 15 aa, Artificial Sequence
  Cyclic GFR-binding peptide
  MOD_RES (14)..(15): Xaa is C or S
FYLMSIANLETPVXX

SEQ ID NO: 6619 - protein, 16 aa, Artificial Sequence
  Cyclic GFR-binding peptide
VVKENEDYYLMSTASL

SEQ ID NO: 6620 - protein, 27 aa, Artificial Sequence
  Cyclic GFR-binding peptide
  MOD_RES (21)..(22): Xaa is C or S
IVNSSDDYYLVSTASLKTPAXXPKPVY

SEQ ID NO: 6621 - protein, 20 aa, Artificial Sequence
  Cyclic GFR-binding peptide
  MOD_RES (14)..(15): Xaa is C or S
LYLISIASLDQPVXXPSASA

SEQ ID NO: 6622 - protein, 19 aa, Artificial Sequence
  Cyclic GFR-binding peptide
  MOD_RES (14)..(14): Xaa is C or S
KYLVSIPSLKTPAXTPKTV

SEQ ID NO: 6623 - protein, 15 aa, Artificial Sequence
  Cyclic GFR-binding peptide
  MOD_RES (14)..(14): Xaa is C or S
LYLVSIASLKTPAXT

SEQ ID NO: 6624 - protein, 26 aa, Artificial Sequence
  Cyclic GFR-binding peptide
  MOD_RES (20)..(21): Xaa is C or S
VKENEDFYLMSIANLETPVXXAKPIK

SEQ ID NO: 6625 - protein, 18 aa, Artificial Sequence
  Cyclic GFR-binding peptide
  MOD_RES (14)..(15): Xaa is C or S
KYLVSIPSLKTPAXXAKP

SEQ ID NO: 6626 - protein, 25 aa, Artificial Sequence
  Cyclic GFR-binding peptide
  MOD_RES (19)..(20): Xaa is C or S
NSSDDYYLVSTASLQTPAXXPKPVT

SEQ ID NO: 6627 - protein, 15 aa, Artificial Sequence
  Cyclic GFR-binding peptide
KYLVSIPSLQVQTPR

SEQ ID NO: 6628 - protein, 23 aa, Artificial Sequence
  Cyclic GFR-binding peptide
  MOD_RES (17)..(18): Xaa is C or S
YEDFYLMSIANLETPVXXAKPIS

SEQ ID NO: 6629 - protein, 19 aa, Artificial Sequence
  Cyclic GFR-binding peptide
  MOD_RES (14)..(15): Xaa is C or S
YYLVSTASLKTPAXXPKPV

SEQ ID NO: 6630 - protein, 18 aa, Artificial Sequence
  Cyclic GFR-binding peptide
VKPTRGVLYLISIASLDQ

SEQ ID NO: 6631 - protein, 20 aa, Artificial Sequence
  Cyclic GFR-binding peptide
  MOD_RES (14)..(15): Xaa is C or S
KYLMSIPSLETPVXXAKPIK

SEQ ID NO: 6632 - protein, 26 aa, Artificial Sequence
  Cyclic GFR-binding peptide
  MOD_RES (20)..(21): Xaa is C or S
PVGMDDFYLVSIANLKTPVXXAKGVK

SEQ ID NO: 6633 - protein, 16 aa, Artificial Sequence
  Cyclic GFR-binding peptide
IVNNSSDLYLVSIASL

SEQ ID NO: 6634 - protein, 23 aa, Artificial Sequence
  Cyclic GFR-binding peptide
  MOD_RES (19)..(19): Xaa is C or S
VIEKYLVSIPSLQVQTPRXQVNR

SEQ ID NO: 6635 - protein, 23 aa, Artificial Sequence
  Cyclic GFR-binding peptide
  MOD_RES (17)..(18): Xaa is C or S
RGVLYLISIASLDQPVXXPSASA

SEQ ID NO: 6636 - protein, 20 aa, Artificial Sequence
  Cyclic GFR-binding peptide
  MOD_RES (14)..(15): Xaa is C or S
YYLISTASLDQSVXXPSASA

SEQ ID NO: 6637 - protein, 15 aa, Artificial Sequence
  Cyclic GFR-binding peptide
VKPKRGVLYLISIAS

SEQ ID NO: 6638 - protein, 25 aa, Artificial Sequence
  Cyclic GFR-binding peptide
  MOD_RES (19)..(20): Xaa is C or S
NSSDDKYLVSIPSLQTPAXXPKPVT

SEQ ID NO: 6639 - protein, 16 aa, Artificial Sequence
  Cyclic GFR-binding peptide
IVNSSDDYYLVSTASL

SEQ ID NO: 6640 - protein, 20 aa, Artificial Sequence
  Cyclic GFR-binding peptide
  MOD_RES (14)..(15): Xaa is C or S
YYLMSTASLETPVXXAKPIK

SEQ ID NO: 6641 - protein, 16 aa, Artificial Sequence
  Cyclic GFR-binding peptide
  MOD_RES (14)..(15): Xaa is C or S
FYLISIANLDQSVXXP

SEQ ID NO: 6642 - protein, 14 aa, Artificial Sequence
  Cyclic GFR-binding peptide
  MOD_RES (14)..(14): Xaa is C or S
FYLMSIANLETPVX

SEQ ID NO: 6643 - protein, 13 aa, Artificial Sequence
  Cyclic GFR-binding peptide
KYLVSIPSLQVQT

SEQ ID NO: 6644 - protein, 17 aa, Artificial Sequence
  Cyclic GFR-binding peptide
  MOD_RES (14)..(15): Xaa is C or S
LYLISIASLDQSVXXPS

SEQ ID NO: 6645 - protein, 20 aa, Artificial Sequence
  Cyclic GFR-binding peptide
  MOD_RES (14)..(15): Xaa is C or S
FYLISIANLDQPVXXPSASA

SEQ ID NO: 6646 - protein, 25 aa, Artificial Sequence
  Cyclic GFR-binding peptide
  MOD_RES (19)..(20): Xaa is C or S
KDYEDKYLMSIPSLETPVXXAKPIS

SEQ ID NO: 6647 - protein, 14 aa, Artificial Sequence
  Cyclic GFR-binding peptide
  MOD_RES (14)..(14): Xaa is C or S
FYLVSIANLKTPVX

SEQ ID NO: 6648 - protein, 16 aa, Artificial Sequence
  Cyclic GFR-binding peptide
IVNNSSDKYLVSIPSL

SEQ ID NO: 6649 - protein, 15 aa, Artificial Sequence
  Cyclic GFR-binding peptide
  MOD_RES (14)..(15): Xaa is C or S
YYLVSTASLQTPAXX

SEQ ID NO: 6650 - protein, 17 aa, Artificial Sequence
  Cyclic GFR-binding peptide
IKPTKGIYYLISTASLD

SEQ ID NO: 6651 - protein, 14 aa, Artificial Sequence
  Cyclic GFR-binding peptide
  MOD_RES (14)..(14): Xaa is C or S
LYLVSIASLKTPVX

SEQ ID NO: 6652 - protein, 19 aa, Artificial Sequence
  Cyclic GFR-binding peptide
IVNSSDDYYLVSTASLQTP

SEQ ID NO: 6653 - protein, 15 aa, Artificial Sequence
  Cyclic GFR-binding peptide
IKPTKGIKYLISIPS

SEQ ID NO: 6654 - protein, 19 aa, Artificial Sequence
  Cyclic GFR-binding peptide
IVNSSDDYYLVSTASLKTP

SEQ ID NO: 6655 - protein, 18 aa, Artificial Sequence
  Cyclic GFR-binding peptide
IKPTKGIFYLISIANLDQ

SEQ ID NO: 6656 - protein, 20 aa, Artificial Sequence
  Cyclic GFR-binding peptide
  MOD_RES (14)..(14): Xaa is C or S
KYLVSIPSLKTPAXTPKTVH

SEQ ID NO: 6657 - protein, 24 aa, Artificial Sequence
  Cyclic GFR-binding peptide
  MOD_RES (18)..(19): Xaa is C or S
TKGILYLISIASLDQSVXXPSASA

SEQ ID NO: 6658 - protein, 19 aa, Artificial Sequence
  Cyclic GFR-binding peptide
  MOD_RES (14)..(14): Xaa is C or S
YYLVSTASLKTPAXTPKTV

SEQ ID NO: 6659 - protein, 16 aa, Artificial Sequence
  Cyclic GFR-binding peptide
  MOD_RES (14)..(15): Xaa is C or S
LYLISIASLDQSVXXP

SEQ ID NO: 6660 - protein, 19 aa, Artificial Sequence
  Cyclic GFR-binding peptide
IVNNSSDLYLVSIASLKTP

SEQ ID NO: 6661 - protein, 24 aa, Artificial Sequence
  Cyclic GFR-binding peptide
  MOD_RES (18)..(19): Xaa is C or S
SSDDYYLVSTASLKTPAXXPKPVY

SEQ ID NO: 6662 - protein, 19 aa, Artificial Sequence
  Cyclic GFR-binding peptide
  MOD_RES (16)..(16): Xaa is C or S
KYLVSIPSLQVQTPRXQVN

SEQ ID NO: 6663 - protein, 22 aa, Artificial Sequence
  Cyclic GFR-binding peptide
  MOD_RES (16)..(17): Xaa is C or S
DDYYLVSTASLKTPVXXAKGVK

SEQ ID NO: 6664 - protein, 23 aa, Artificial Sequence
  Cyclic GFR-binding peptide
  MOD_RES (19)..(19): Xaa is C or S
VIEYYLVSTASLQVQTPRXQVNR

SEQ ID NO: 6665 - protein, 21 aa, Artificial Sequence
  Cyclic GFR-binding peptide
  MOD_RES (15)..(16): Xaa is C or S
IFYLISIANLDQSVXXPSASA

SEQ ID NO: 6666 - protein, 27 aa, Artificial Sequence
  Cyclic GFR-binding peptide
  MOD_RES (21)..(22): Xaa is C or S
IKPTKGIYYLISTASLDQSVXXPSASA

SEQ ID NO: 6667 - protein, 17 aa, Artificial Sequence
  Cyclic GFR-binding peptide
  MOD_RES (14)..(15): Xaa is C or S
FYLISIANLDQSVXXPS

SEQ ID NO: 6668 - protein, 19 aa, Artificial Sequence
  Cyclic GFR-binding peptide
VVKDYEDFYLMSIANLETP

SEQ ID NO: 6669 - protein, 22 aa, Artificial Sequence
  Cyclic GFR-binding peptide
  MOD_RES (16)..(17): Xaa is C or S
EDFYLMSIANLETPVXXAKPIS

SEQ ID NO: 6670 - protein, 18 aa, Artificial Sequence
  Cyclic GFR-binding peptide
  MOD_RES (14)..(15): Xaa is C or S
KYLMSIPSLETPVXXAKP

SEQ ID NO: 6671 - protein, 27 aa, Artificial Sequence
  Cyclic GFR-binding peptide
  MOD_RES (21)..(22): Xaa is C or S
TPVGMDDFYLVSIANLKTPVXXAKGVK

SEQ ID NO: 6672 - protein, 29 aa, Artificial Sequence
  Cyclic GFR-binding peptide
  MOD_RES (25)..(25): Xaa is C or S
FIPKKRVIEKYLVSIPSLQVQTPRXQVNR

SEQ ID NO: 6673 - protein, 18 aa, Artificial Sequence
  Cyclic GFR-binding peptide
  MOD_RES (14)..(15): Xaa is C or S
KYLISIPSLDQSVXXPSA

SEQ ID NO: 6674 - protein, 19 aa, Artificial Sequence
  Cyclic GFR-binding peptide
  MOD_RES (14)..(15): Xaa is C or S
YYLISTASLDQSVXXPSAS

SEQ ID NO: 6675 - protein, 27 aa, Artificial Sequence
  Cyclic GFR-binding peptide
  MOD_RES (21)..(22): Xaa is C or S
TPVGMDDLYLVSIASLKTPVXXAKGVK

SEQ ID NO: 6676 - protein, 28 aa, Artificial Sequence
  Cyclic GFR-binding peptide
  MOD_RES (24)..(24): Xaa is C or S
IPKKRVIEKYLVSIPSLQVQTPRXQVNR

SEQ ID NO: 6677 - protein, 21 aa, Artificial Sequence
  Cyclic GFR-binding peptide
  MOD_RES (15)..(16): Xaa is C or S
IKYLISIPSLDQSVXXPSASA

SEQ ID NO: 6678 - protein, 18 aa, Artificial Sequence
  Cyclic GFR-binding peptide
VKPKRGVYYLISTASLAQ

SEQ ID NO: 6679 - protein, 22 aa, Artificial Sequence
  Cyclic GFR-binding peptide
  MOD_RES (16)..(17): Xaa is C or S
GVLYLISIASLAQPVXXPAASA

SEQ ID NO: 6680 - protein, 16 aa, Artificial Sequence
  Cyclic GFR-binding peptide
TPVGMDDFYLVSIANL

SEQ ID NO: 6681 - protein, 25 aa, Artificial Sequence
  Cyclic GFR-binding peptide
  MOD_RES (19)..(20): Xaa is C or S
NSSDDLYLVSIASLKTPAXXPKPVY

SEQ ID NO: 6682 - protein, 26 aa, Artificial Sequence
  Cyclic GFR-binding peptide
  MOD_RES (20)..(21): Xaa is C or S
VNSSDDYYLVSTASLQTPAXXPKPVT

SEQ ID NO: 6683 - protein, 24 aa, Artificial Sequence
  Cyclic GFR-binding peptide
  MOD_RES (18)..(19): Xaa is C or S
DYEDKYLMSIPSLETPVXXAKPIS

SEQ ID NO: 6684 - protein, 21 aa, Artificial Sequence
  Cyclic GFR-binding peptide
  MOD_RES (15)..(16): Xaa is C or S
VKYLISIPSLDQPVXXPSASA

SEQ ID NO: 6685 - protein, 17 aa, Artificial Sequence
  Cyclic GFR-binding peptide
VVKENEDKYLMSIPSLE

SEQ ID NO: 6686 - protein, 13 aa, Artificial Sequence
  Cyclic GFR-binding peptide
YYLISTASLDQSV

SEQ ID NO: 6687 - protein, 22 aa, Artificial Sequence
  Cyclic GFR-binding peptide
  MOD_RES (16)..(17): Xaa is C or S
SDFYLVSIANLKTPAXXAKPVA

SEQ ID NO: 6688 - protein, 22 aa, Artificial Sequence
  Cyclic GFR-binding peptide
  MOD_RES (16)..(17): Xaa is C or S
DDFYLVSIANLKTPVXXAKGVK

SEQ ID NO: 6689 - protein, 20 aa, Artificial Sequence
  Cyclic GFR-binding peptide
  MOD_RES (14)..(15): Xaa is C or S
YYLVSTASLQTPAXXPKPVT

SEQ ID NO: 6690 - protein, 23 aa, Artificial Sequence
  Cyclic GFR-binding peptide
  MOD_RES (17)..(18): Xaa is C or S
NEDYYLMSTASLETPVXXAKPIK

SEQ ID NO: 6691 - protein, 22 aa, Artificial Sequence
  Cyclic GFR-binding peptide
  MOD_RES (16)..(17): Xaa is C or S
GVYYLISTASLAQPVXXPAASA

SEQ ID NO: 6692 - protein, 20 aa, Artificial Sequence
  Cyclic GFR-binding peptide
  MOD_RES (16)..(16): Xaa is C or S
YYLVSTASLQVQTPRXQVNR

SEQ ID NO: 6693 - protein, 23 aa, Artificial Sequence
  Cyclic GFR-binding peptide
  MOD_RES (17)..(18): Xaa is C or S
MDDLYLVSIASLKTPVXXAKGVK

SEQ ID NO: 6694 - protein, 18 aa, Artificial Sequence
  Cyclic GFR-binding peptide
IVNNSSDFYLVSIANLKT

SEQ ID NO: 6695 - protein, 16 aa, Artificial Sequence
  Cyclic GFR-binding peptide
VVKENEDFYLMSIANL

SEQ ID NO: 6696 - protein, 16 aa, Artificial Sequence
  Cyclic GFR-binding peptide
  MOD_RES (14)..(15): Xaa is C or S
LYLISIASLAQPVXXP

SEQ ID NO: 6697 - protein, 16 aa, Artificial Sequence
  Cyclic GFR-binding peptide
  MOD_RES (14)..(15): Xaa is C or S
LYLVSIASLQTPAXXP

SEQ ID NO: 6698 - protein, 23 aa, Artificial Sequence
  Cyclic GFR-binding peptide
  MOD_RES (17)..(18): Xaa is C or S
RGVKYLISIPSLAQPVXXPAASA

SEQ ID NO: 6699 - protein, 22 aa, Artificial Sequence
  Cyclic GFR-binding peptide
  MOD_RES (16)..(16): Xaa is C or S
DDLYLVSIASLKTPAXTPKTVH

SEQ ID NO: 6700 - protein, 18 aa, Artificial Sequence
  Cyclic GFR-binding peptide
IVNNSSDLYLVSIASLKT

SEQ ID NO: 6701 - protein, 15 aa, Artificial Sequence
  Cyclic GFR-binding peptide
VVKENEDKYLMSIPS

SEQ ID NO: 6702 - protein, 25 aa, Artificial Sequence
  Cyclic GFR-binding peptide
  MOD_RES (19)..(20): Xaa is C or S
PTRGVYYLISTASLDQPVXXPSASA

SEQ ID NO: 6703 - protein, 15 aa, Artificial Sequence
  Cyclic GFR-binding peptide
VVKDYEDYYLMSTAS

SEQ ID NO: 6704 - protein, 19 aa, Artificial Sequence
  Cyclic GFR-binding peptide
  MOD_RES (14)..(15): Xaa is C or S
YYLVSTASLQTPAXXPKPV

SEQ ID NO: 6705 - protein, 22 aa, Artificial Sequence
  Cyclic GFR-binding peptide
  MOD_RES (16)..(17): Xaa is C or S
GIFYLISIANLDQSVXXPSASA

SEQ ID NO: 6706 - protein, 14 aa, Artificial Sequence
  Cyclic GFR-binding peptide
FYLVSIANLQVQTP

SEQ ID NO: 6707 - protein, 26 aa, Artificial Sequence
  Cyclic GFR-binding peptide
  MOD_RES (20)..(21): Xaa is C or S
VKDYEDFYLMSIANLETPVXXAKPIS

SEQ ID NO: 6708 - protein, 26 aa, Artificial Sequence
  Cyclic GFR-binding peptide
  MOD_RES (20)..(20): Xaa is C or S
VNSSDDKYLVSIPSLKTPAXTPKTVH

SEQ ID NO: 6709 - protein, 17 aa, Artificial Sequence
  Cyclic GFR-binding peptide
  MOD_RES (14)..(15): Xaa is C or S
FYLISIANLDQPVXXPS

SEQ ID NO: 6710 - protein, 16 aa, Artificial Sequence
  Cyclic GFR-binding peptide
  MOD_RES (14)..(15): Xaa is C or S
LYLVSIASLKTPAXXA

SEQ ID NO: 6711 - protein, 18 aa, Artificial Sequence
  Cyclic GFR-binding peptide
  MOD_RES (14)..(15): Xaa is C or S
LYLISIASLDQPVXXPSA

SEQ ID NO: 6712 - protein, 22 aa, Artificial Sequence
  Cyclic GFR-binding peptide
  MOD_RES (16)..(17): Xaa is C or S
DDLYLVSIASLKTPAXXPKPVY

SEQ ID NO: 6713 - protein, 18 aa, Artificial Sequence
  Cyclic GFR-binding peptide
  MOD_RES (14)..(15): Xaa is C or S
LYLVSIASLKTPVXXAKG

SEQ ID NO: 6714 - protein, 23 aa, Artificial Sequence
  Cyclic GFR-binding peptide
  MOD_RES (17)..(18): Xaa is C or S
SSDFYLVSIANLKTPAXXAKPVA

SEQ ID NO: 6715 - protein, 21 aa, Artificial Sequence
  Cyclic GFR-binding peptide
  MOD_RES (15)..(15): Xaa is C or S
DYYLVSTASLKTPAXTPKTVH

SEQ ID NO: 6716 - protein, 24 aa, Artificial Sequence
  Cyclic GFR-binding peptide
  MOD_RES (18)..(19): Xaa is C or S
TKGIKYLISIPSLDQSVXXPSASA

SEQ ID NO: 6717 - protein, 27 aa, Artificial Sequence
  Cyclic GFR-binding peptide
  MOD_RES (21)..(22): Xaa is C or S
TPVGMDDYYLVSTASLKTPVXXAKGVK

SEQ ID NO: 6718 - protein, 18 aa, Artificial Sequence
  Cyclic GFR-binding peptide
  MOD_RES (16)..(16): Xaa is C or S
YYLVSTASLQVQTPRXQV

SEQ ID NO: 6719 - protein, 18 aa, Artificial Sequence
  Cyclic GFR-binding peptide
  MOD_RES (14)..(15): Xaa is C or S
FYLMSIANLETPVXXAKP

SEQ ID NO: 6720 - protein, 13 aa, Artificial Sequence
  Cyclic GFR-binding peptide
YYLISTASLAQPV

SEQ ID NO: 6721 - protein, 17 aa, Artificial Sequence
  Cyclic GFR-binding peptide
TPVGMDDLYLVSIASLK

SEQ ID NO: 6722 - protein, 18 aa, Artificial Sequence
  Cyclic GFR-binding peptide
VVKDYEDKYLMSIPSLET

SEQ ID NO: 6723 - protein, 18 aa, Artificial Sequence
  Cyclic GFR-binding peptide
IKPTKGILYLISIASLDQ

SEQ ID NO: 6724 - protein, 16 aa, Artificial Sequence
  Cyclic GFR-binding peptide
TPVGMDDLYLVSIASL

SEQ ID NO: 6725 - protein, 17 aa, Artificial Sequence
  Cyclic GFR-binding peptide
  MOD_RES (16)..(16): Xaa is C or S
YYLVSTASLQVQTPRXQ

SEQ ID NO: 6726 - protein, 17 aa, Artificial Sequence
  Cyclic GFR-binding peptide
  MOD_RES (14)..(15): Xaa is C or S
KYLISIPSLAQPVXXPA

SEQ ID NO: 6727 - protein, 24 aa, Artificial Sequence
  Cyclic GFR-binding peptide
  MOD_RES (18)..(18): Xaa is C or S
SSDDYYLVSTASLKTPAXTPKTVH

SEQ ID NO: 6728 - protein, 25 aa, Artificial Sequence
  Cyclic GFR-binding peptide
  MOD_RES (19)..(20): Xaa is C or S
PTKGIFYLISIANLDQSVXXPSASA

SEQ ID NO: 6729 - protein, 18 aa, Artificial Sequence
  Cyclic GFR-binding peptide
  MOD_RES (14)..(15): Xaa is C or S
FYLVSIANLKTPVXXAKG

SEQ ID NO: 6730 - protein, 27 aa, Artificial Sequence
  Cyclic GFR-binding peptide
  MOD_RES (21)..(22): Xaa is C or S
IKPTKGILYLISIASLDQSVXXPSASA

SEQ ID NO: 6731 - protein, 17 aa, Artificial Sequence
  Cyclic GFR-binding peptide
FIPKKRVIEYYLVSTAS

SEQ ID NO: 6732 - protein, 15 aa, Artificial Sequence
  Cyclic GFR-binding peptide
  MOD_RES (14)..(15): Xaa is C or S
YYLISTASLAQPVXX

SEQ ID NO: 6733 - protein, 21 aa, Artificial Sequence
  Cyclic GFR-binding peptide
  MOD_RES (15)..(16): Xaa is C or S
VFYLISIANLDQPVXXPSASA

SEQ ID NO: 6734 - protein, 17 aa, Artificial Sequence
  Cyclic GFR-binding peptide
  MOD_RES (14)..(15): Xaa is C or S
FYLISIANLAQPVXXPA

SEQ ID NO: 6735 - protein, 18 aa, Artificial Sequence
  Cyclic GFR-binding peptide
  MOD_RES (14)..(15): Xaa is C or S
LYLISIASLAQPVXXPAA

SEQ ID NO: 6736 - protein, 26 aa, Artificial Sequence
  Cyclic GFR-binding peptide
  MOD_RES (20)..(21): Xaa is C or S
VNSSDDLYLVSIASLQTPAXXPKPVT

SEQ ID NO: 6737 - protein, 18 aa, Artificial Sequence
  Cyclic GFR-binding peptide
VKPTRGVYYLISTASLDQ

SEQ ID NO: 6738 - protein, 26 aa, Artificial Sequence
  Cyclic GFR-binding peptide
  MOD_RES (20)..(21): Xaa is C or S
VNSSDDYYLVSTASLKTPAXXPKPVY

SEQ ID NO: 6739 - protein, 19 aa, Artificial Sequence
  Cyclic GFR-binding peptide
IVNNSSDFYLVSIANLKTP

SEQ ID NO: 6740 - protein, 20 aa, Artificial Sequence
  Cyclic GFR-binding peptide
  MOD_RES (14)..(14): Xaa is C or S
LYLVSIASLKTPAXTPKTVH

SEQ ID NO: 6741 - protein, 18 aa, Artificial Sequence
  Cyclic GFR-binding peptide
  MOD_RES (14)..(15): Xaa is C or S
KYLISIPSLDQPVXXPSA

SEQ ID NO: 6742 - protein, 13 aa, Artificial Sequence
  Cyclic GFR-binding peptide
LYLVSIASLKTPA

SEQ ID NO: 6743 - protein, 19 aa, Artificial Sequence
  Cyclic GFR-binding peptide
  MOD_RES (14)..(15): Xaa is C or S
YYLISTASLAQPVXXPAAS

SEQ ID NO: 6744 - protein, 21 aa, Artificial Sequence
  Cyclic GFR-binding peptide
FIPKKRVIEYYLVSTASLQVQ

SEQ ID NO: 6745 - protein, 25 aa, Artificial Sequence
  Cyclic GFR-binding peptide
  MOD_RES (21)..(21): Xaa is C or S
KRVIEFYLVSIANLQVQTPRXQVNR

SEQ ID NO: 6746 - protein, 17 aa, Artificial Sequence
  Cyclic GFR-binding peptide
  MOD_RES (14)..(15): Xaa is C or S
FYLVSIANLKTPAXXAK

SEQ ID NO: 6747 - protein, 23 aa, Artificial Sequence
  Cyclic GFR-binding peptide
  MOD_RES (17)..(18): Xaa is C or S
MDDYYLVSTASLKTPVXXAKGVK

SEQ ID NO: 6748 - protein, 17 aa, Artificial Sequence
  Cyclic GFR-binding peptide
  MOD_RES (14)..(15): Xaa is C or S
KYLISIPSLDQPVXXPS

SEQ ID NO: 6749 - protein, 26 aa, Artificial Sequence
  Cyclic GFR-binding peptide
  MOD_RES (20)..(21): Xaa is C or S
KPTRGVLYLISIASLDQPVXXPSASA

SEQ ID NO: 6750 - protein, 17 aa, Artificial Sequence
  Cyclic GFR-binding peptide
VVKDYEDYYLMSTASLE

SEQ ID NO: 6751 - protein, 19 aa, Artificial Sequence
  Cyclic GFR-binding peptide
  MOD_RES (14)..(15): Xaa is C or S
YYLISTASLDQPVXXPSAS

SEQ ID NO: 6752 - protein, 23 aa, Artificial Sequence
  Cyclic GFR-binding peptide
  MOD_RES (17)..(18): Xaa is C or S
YEDYYLMSTASLETPVXXAKPIS

SEQ ID NO: 6753 - protein, 15 aa, Artificial Sequence
  Cyclic GFR-binding peptide
TPVGMDDLYLVSIAS

SEQ ID NO: 6754 - protein, 16 aa, Artificial Sequence
  Cyclic GFR-binding peptide
  MOD_RES (14)..(15): Xaa is C or S
KYLISIPSLAQPVXXP

SEQ ID NO: 6755 - protein, 22 aa, Artificial Sequence
  Cyclic GFR-binding peptide
  MOD_RES (16)..(17): Xaa is C or S
GILYLISIASLDQSVXXPSASA

SEQ ID NO: 6756 - protein, 16 aa, Artificial Sequence
  Cyclic GFR-binding peptide
  MOD_RES (14)..(15): Xaa is C or S
YYLVSTASLKTPAXXP

SEQ ID NO: 6757 - protein, 26 aa, Artificial Sequence
  Cyclic GFR-binding peptide
  MOD_RES (20)..(21): Xaa is C or S
KPKRGVFYLISIANLAQPVXXPAASA

SEQ ID NO: 6758 - protein, 22 aa, Artificial Sequence
  Cyclic GFR-binding peptide
  MOD_RES (16)..(17): Xaa is C or S
SDLYLVSIASLKTPAXXAKPVA

SEQ ID NO: 6759 - protein, 23 aa, Artificial Sequence
  Cyclic GFR-binding peptide
  MOD_RES (17)..(18): Xaa is C or S
SSDLYLVSIASLKTPAXXAKPVA

SEQ ID NO: 6760 - protein, 17 aa, Artificial Sequence
  Cyclic GFR-binding peptide
  MOD_RES (14)..(15): Xaa is C or S
FYLVSIANLKTPVXXAK

SEQ ID NO: 6761 - protein, 15 aa, Artificial Sequence
  Cyclic GFR-binding peptide
FYLVSIANLQVQTPR

SEQ ID NO: 6762 - protein, 27 aa, Artificial Sequence
  Cyclic GFR-binding peptide
  MOD_RES (21)..(22): Xaa is C or S
IKPTKGIKYLISIPSLDQSVXXPSASA

SEQ ID NO: 6763 - protein, 22 aa, Artificial Sequence
  Cyclic GFR-binding peptide
  MOD_RES (16)..(17): Xaa is C or S
GVKYLISIPSLDQPVXXPSASA

SEQ ID NO: 6764 - protein, 15 aa, Artificial Sequence
  Cyclic GFR-binding peptide
  MOD_RES (14)..(15): Xaa is C or S
FYLISIANLDQPVXX

SEQ ID NO: 6765 - protein, 14 aa, Artificial Sequence
  Cyclic GFR-binding peptide
  MOD_RES (14)..(14): Xaa is C or S
KYLMSIPSLETPVX

SEQ ID NO: 6766 - protein, 17 aa, Artificial Sequence
  Cyclic GFR-binding peptide
  MOD_RES (14)..(15): Xaa is C or S
YYLISTASLDQSVXXPS

SEQ ID NO: 6767 - protein, 18 aa, Artificial Sequence
  Cyclic GFR-binding peptide
IVNSSDDYYLVSTASLKT

SEQ ID NO: 6768 - protein, 22 aa, Artificial Sequence
  Cyclic GFR-binding peptide
  MOD_RES (16)..(17): Xaa is C or S
GVYYLISTASLDQPVXXPSASA

SEQ ID NO: 6769 - protein, 18 aa, Artificial Sequence
  Cyclic GFR-binding peptide
IVNSSDDYYLVSTASLQT

SEQ ID NO: 6770 - protein, 21 aa, Artificial Sequence
  Cyclic GFR-binding peptide
  MOD_RES (17)..(17): Xaa is C or S
ELYLVSIASLQVQTPRXQVNR

SEQ ID NO: 6771 - protein, 17 aa, Artificial Sequence
  Cyclic GFR-binding peptide
VVKENEDFYLMSIANLE

SEQ ID NO: 6772 - protein, 17 aa, Artificial Sequence
  Cyclic GFR-binding peptide
FIPKKRVIEKYLVSIPS

SEQ ID NO: 6773 - protein, 21 aa, Artificial Sequence
  Cyclic GFR-binding peptide
FIPKKRVIEKYLVSIPSLQVQ

SEQ ID NO: 6774 - protein, 21 aa, Artificial Sequence
  Cyclic GFR-binding peptide
  MOD_RES (15)..(16): Xaa is C or S
DKYLVSIPSLKTPAXXAKPVA

SEQ ID NO: 6775 - protein, 24 aa, Artificial Sequence
  Cyclic GFR-binding peptide
  MOD_RES (18)..(19): Xaa is C or S
SSDDKYLVSIPSLQTPAXXPKPVT

SEQ ID NO: 6776 - protein, 23 aa, Artificial Sequence
  Cyclic GFR-binding peptide
  MOD_RES (17)..(17): Xaa is C or S
SDDYYLVSTASLKTPAXTPKTVH

SEQ ID NO: 6777 - protein, 14 aa, Artificial Sequence
  Cyclic GFR-binding peptide
  MOD_RES (14)..(14): Xaa is C or S
LYLISIASLDQPVX

SEQ ID NO: 6778 - protein, 16 aa, Artificial Sequence
  Cyclic GFR-binding peptide
VVKDYEDYYLMSTASL

SEQ ID NO: 6779 - protein, 15 aa, Artificial Sequence
  Cyclic GFR-binding peptide
  MOD_RES (14)..(14): Xaa is C or S
KYLVSIPSLKTPAXT

SEQ ID NO: 6780 - protein, 22 aa, Artificial Sequence
  Cyclic GFR-binding peptide
  MOD_RES (16)..(17): Xaa is C or S
EDYYLMSTASLETPVXXAKPIK

SEQ ID NO: 6781 - protein, 18 aa, Artificial Sequence
  Cyclic GFR-binding peptide
  MOD_RES (14)..(15): Xaa is C or S
LYLVSIASLKTPAXXPKP

SEQ ID NO: 6782 - protein, 18 aa, Artificial Sequence
  Cyclic GFR-binding peptide
VVKDYEDFYLMSIANLET

SEQ ID NO: 6783 - protein, 14 aa, Artificial Sequence
  Cyclic GFR-binding peptide
  MOD_RES (14)..(14): Xaa is C or S
FYLISIANLDQSVX

SEQ ID NO: 6784 - protein, 26 aa, Artificial Sequence
  Cyclic GFR-binding peptide
  MOD_RES (20)..(21): Xaa is C or S
VNSSDDKYLVSIPSLQTPAXXPKPVT

SEQ ID NO: 6785 - protein, 21 aa, Artificial Sequence
  Cyclic GFR-binding peptide
  MOD_RES (15)..(16): Xaa is C or S
DYYLMSTASLETPVXXAKPIK

SEQ ID NO: 6786 - protein, 15 aa, Artificial Sequence
  Cyclic GFR-binding peptide
  MOD_RES (14)..(15): Xaa is C or S
KYLMSIPSLETPVXX

SEQ ID NO: 6787 - protein, 26 aa, Artificial Sequence
  Cyclic GFR-binding peptide
  MOD_RES (20)..(21): Xaa is C or S
VNSSDDKYLVSIPSLKTPAXXPKPVY

SEQ ID NO: 6788 - protein, 14 aa, Artificial Sequence
  Cyclic GFR-binding peptide
  MOD_RES (14)..(14): Xaa is C or S
FYLISIANLDQPVX

SEQ ID NO: 6789 - protein, 13 aa, Artificial Sequence
  Cyclic GFR-binding peptide
FYLISIANLDQPV

SEQ ID NO: 6790 - protein, 25 aa, Artificial Sequence
  Cyclic GFR-binding peptide
  MOD_RES (21)..(21): Xaa is C or S
KRVIEKYLVSIPSLQVQTPRXQVNR

SEQ ID NO: 6791 - protein, 15 aa, Artificial Sequence
  Cyclic GFR-binding peptide
  MOD_RES (14)..(15): Xaa is C or S
YYLISTASLDQSVXX

SEQ ID NO: 6792 - protein, 15 aa, Artificial Sequence
  Cyclic GFR-binding peptide
IVNNSSDFYLVSIAN

SEQ ID NO: 6793 - protein, 22 aa, Artificial Sequence
  Cyclic GFR-binding peptide
  MOD_RES (16)..(17): Xaa is C or S
DDYYLVSTASLKTPAXXPKPVY

SEQ ID NO: 6794 - protein, 16 aa, Artificial Sequence
  Cyclic GFR-binding peptide
VVKENEDKYLMSIPSL

SEQ ID NO: 6795 - protein, 15 aa, Artificial Sequence
  Cyclic GFR-binding peptide
  MOD_RES (14)..(15): Xaa is C or S
LYLVSIASLKTPAXX

SEQ ID NO: 6796 - protein, 15 aa, Artificial Sequence
  Cyclic GFR-binding peptide
TPVGMDDYYLVSTAS

SEQ ID NO: 6797 - protein, 16 aa, Artificial Sequence
  Cyclic GFR-binding peptide
  MOD_RES (14)..(15): Xaa is C or S
FYLVSIANLKTPVXXA

SEQ ID NO: 6798 - protein, 25 aa, Artificial Sequence
  Cyclic GFR-binding peptide
  MOD_RES (19)..(20): Xaa is C or S
PTKGIKYLISIPSLDQSVXXPSASA

SEQ ID NO: 6799 - protein, 16 aa, Artificial Sequence
  Cyclic GFR-binding peptide
  MOD_RES (14)..(15): Xaa is C or S
KYLISIPSLDQSVXXP

SEQ ID NO: 6800 - protein, 24 aa, Artificial Sequence
  Cyclic GFR-binding peptide
  MOD_RES (18)..(19): Xaa is C or S
DYEDFYLMSIANLETPVXXAKPIS

SEQ ID NO: 6801 - protein, 25 aa, Artificial Sequence
  Cyclic GFR-binding peptide
  MOD_RES (19)..(20): Xaa is C or S
VGMDDFYLVSIANLKTPVXXAKGVK

SEQ ID NO: 6802 - protein, 18 aa, Artificial Sequence
  Cyclic GFR-binding peptide
  MOD_RES (14)..(15): Xaa is C or S
FYLISIANLDQSVXXPSA

SEQ ID NO: 6803 - protein, 20 aa, Artificial Sequence
  Cyclic GFR-binding peptide
  MOD_RES (14)..(15): Xaa is C or S
YYLVSTASLKTPAXXPKPVY

SEQ ID NO: 6804 - protein, 16 aa, Artificial Sequence
  Cyclic GFR-binding peptide
  MOD_RES (14)..(15): Xaa is C or S
LYLVSIASLKTPVXXA

SEQ ID NO: 6805 - protein, 26 aa, Artificial Sequence
  Cyclic GFR-binding peptide
  MOD_RES (20)..(20): Xaa is C or S
VNSSDDYYLVSTASLKTPAXTPKTVH

SEQ ID NO: 6806 - protein, 25 aa, Artificial Sequence
  Cyclic GFR-binding peptide
  MOD_RES (19)..(20): Xaa is C or S
PKRGVYYLISTASLAQPVXXPAASA

SEQ ID NO: 6807 - protein, 19 aa, Artificial Sequence
  Cyclic GFR-binding peptide
VVKENEDKYLMSIPSLETP

SEQ ID NO: 6808 - protein, 19 aa, Artificial Sequence
  Cyclic GFR-binding peptide
  MOD_RES (16)..(16): Xaa is C or S
FYLVSIANLQVQTPRXQVN

SEQ ID NO: 6809 - protein, 28 aa, Artificial Sequence
  Cyclic GFR-binding peptide
  MOD_RES (24)..(24): Xaa is C or S
IPKKRVIEFYLVSIANLQVQTPRXQVNR

SEQ ID NO: 6810 - protein, 18 aa, Artificial Sequence
  Cyclic GFR-binding peptide
FIPKKRVIEKYLVSIPSL

SEQ ID NO: 6811 - protein, 17 aa, Artificial Sequence
  Cyclic GFR-binding peptide
TPVGMDDFYLVSIANLK

SEQ ID NO: 6812 - protein, 27 aa, Artificial Sequence
  Cyclic GFR-binding peptide
  MOD_RES (21)..(22): Xaa is C or S
IVNSSDDKYLVSIPSLKTPAXXPKPVY

SEQ ID NO: 6813 - protein, 18 aa, Artificial Sequence
  Cyclic GFR-binding peptide
IVNNSSDKYLVSIPSLKT

SEQ ID NO: 6814 - protein, 18 aa, Artificial Sequence
  Cyclic GFR-binding peptide
IKPTKGIYYLISTASLDQ

SEQ ID NO: 6815 - protein, 19 aa, Artificial Sequence
  Cyclic GFR-binding peptide
  MOD_RES (14)..(15): Xaa is C or S
YYLMSTASLETPVXXAKPI

SEQ ID NO: 6816 - protein, 19 aa, Artificial Sequence
  Cyclic GFR-binding peptide
VVKDYEDYYLMSTASLETP

SEQ ID NO: 6817 - protein, 18 aa, Artificial Sequence
  Cyclic GFR-binding peptide
  MOD_RES (14)..(15): Xaa is C or S
LYLISIASLDQSVXXPSA

SEQ ID NO: 6818 - protein, 27 aa, Artificial Sequence
  Cyclic GFR-binding peptide
  MOD_RES (21)..(22): Xaa is C or S
IKPTKGIFYLISIANLDQSVXXPSASA

SEQ ID NO: 6819 - protein, 15 aa, Artificial Sequence
  Cyclic GFR-binding peptide
VVKENEDYYLMSTAS

SEQ ID NO: 6820 - protein, 17 aa, Artificial Sequence
  Cyclic GFR-binding peptide
  MOD_RES (14)..(15): Xaa is C or S
KYLISIPSLDQSVXXPS

SEQ ID NO: 6821 - protein, 17 aa, Artificial Sequence
  Cyclic GFR-binding peptide
FIPKKRVIEFYLVSIAN

SEQ ID NO: 6822 - protein, 17 aa, Artificial Sequence
  Cyclic GFR-binding peptide
IKPTKGILYLISIASLD

SEQ ID NO: 6823 - protein, 17 aa, Artificial Sequence
  Cyclic GFR-binding peptide
IVNNSSDFYLVSIANLK

SEQ ID NO: 6824 - protein, 14 aa, Artificial Sequence
  Cyclic GFR-binding peptide
  MOD_RES (14)..(14): Xaa is C or S
FYLISIANLAQPVX

SEQ ID NO: 6825 - protein, 27 aa, Artificial Sequence
  Cyclic GFR-binding peptide
  MOD_RES (21)..(22): Xaa is C or S
VKPTRGVFYLISIANLDQPVXXPSASA

SEQ ID NO: 6826 - protein, 21 aa, Artificial Sequence
  Cyclic GFR-binding peptide
  MOD_RES (15)..(16): Xaa is C or S
DYYLMSTASLETPVXXAKPIS

SEQ ID NO: 6827 - protein, 17 aa, Artificial Sequence
  Cyclic GFR-binding peptide
  MOD_RES (14)..(15): Xaa is C or S
LYLVSIASLKTPAXXAK

SEQ ID NO: 6828 - protein, 21 aa, Artificial Sequence
  Cyclic GFR-binding peptide
  MOD_RES (15)..(16): Xaa is C or S
VYYLISTASLAQPVXXPAASA

SEQ ID NO: 6829 - protein, 17 aa, Artificial Sequence
  Cyclic GFR-binding peptide
IKPTKGIFYLISIANLD

SEQ ID NO: 6830 - protein, 25 aa, Artificial Sequence
  Cyclic GFR-binding peptide
  MOD_RES (19)..(20): Xaa is C or S
PTKGILYLISIASLDQSVXXPSASA

SEQ ID NO: 6831 - protein, 23 aa, Artificial Sequence
  Cyclic GFR-binding peptide
  MOD_RES (17)..(18): Xaa is C or S
KGILYLISIASLDQSVXXPSASA

SEQ ID NO: 6832 - protein, 20 aa, Artificial Sequence
  Cyclic GFR-binding peptide
FIPKKRVIEKYLVSIPSLQV

SEQ ID NO: 6833 - protein, 22 aa, Artificial Sequence
  Cyclic GFR-binding peptide
  MOD_RES (18)..(18): Xaa is C or S
IEKYLVSIPSLQVQTPRXQVNR

SEQ ID NO: 6834 - protein, 24 aa, Artificial Sequence
  Cyclic GFR-binding peptide
  MOD_RES (18)..(19): Xaa is C or S
KRGVKYLISIPSLAQPVXXPAASA

SEQ ID NO: 6835 - protein, 26 aa, Artificial Sequence
  Cyclic GFR-binding peptide
  MOD_RES (20)..(21): Xaa is C or S
KPTRGVYYLISTASLDQPVXXPSASA

SEQ ID NO: 6836 - protein, 24 aa, Artificial Sequence
  Cyclic GFR-binding peptide
  MOD_RES (18)..(18): Xaa is C or S
SSDDLYLVSIASLKTPAXTPKTVH

SEQ ID NO: 6837 - protein, 19 aa, Artificial Sequence
  Cyclic GFR-binding peptide
  MOD_RES (14)..(15): Xaa is C or S
KYLMSIPSLETPVXXAKPI

SEQ ID NO: 6838 - protein, 16 aa, Artificial Sequence
  Cyclic GFR-binding peptide
IKPTKGIKYLISIPSL

SEQ ID NO: 6839 - protein, 27 aa, Artificial Sequence
  Cyclic GFR-binding peptide
  MOD_RES (21)..(22): Xaa is C or S
VVKDYEDYYLMSTASLETPVXXAKPIS

SEQ ID NO: 6840 - protein, 24 aa, Artificial Sequence
  Cyclic GFR-binding peptide
  MOD_RES (18)..(19): Xaa is C or S
SSDDLYLVSIASLKTPAXXPKPVY

SEQ ID NO: 6841 - protein, 26 aa, Artificial Sequence
  Cyclic GFR-binding peptide
  MOD_RES (20)..(21): Xaa is C or S
VKDYEDKYLMSIPSLETPVXXAKPIS

SEQ ID NO: 6842 - protein, 17 aa, Artificial Sequence
  Cyclic GFR-binding peptide
  MOD_RES (14)..(15): Xaa is C or S
YYLISTASLDQPVXXPS

SEQ ID NO: 6843 - protein, 27 aa, Artificial Sequence
  Cyclic GFR-binding peptide
  MOD_RES (21)..(22): Xaa is C or S
VKPTRGVLYLISIASLDQPVXXPSASA

SEQ ID NO: 6844 - protein, 16 aa, Artificial Sequence
  Cyclic GFR-binding peptide
  MOD_RES (14)..(15): Xaa is C or S
KYLMSIPSLETPVXXA

SEQ ID NO: 6845 - protein, 19 aa, Artificial Sequence
  Cyclic GFR-binding peptide
  MOD_RES (16)..(16): Xaa is C or S
LYLVSIASLQVQTPRXQVN

SEQ ID NO: 6846 - protein, 19 aa, Artificial Sequence
  Cyclic GFR-binding peptide
TPVGMDDFYLVSIANLKTP

SEQ ID NO: 6847 - protein, 24 aa, Artificial Sequence
  Cyclic GFR-binding peptide
  MOD_RES (18)..(19): Xaa is C or S
GMDDYYLVSTASLKTPVXXAKGVK

SEQ ID NO: 6848 - protein, 17 aa, Artificial Sequence
  Cyclic GFR-binding peptide
VKPKRGVYYLISTASLA

SEQ ID NO: 6849 - protein, 16 aa, Artificial Sequence
  Cyclic GFR-binding peptide
VKPKRGVLYLISIASL

SEQ ID NO: 6850 - protein, 18 aa, Artificial Sequence
  Cyclic GFR-binding peptide
  MOD_RES (14)..(14): Xaa is C or S
YYLVSTASLKTPAXTPKT

SEQ ID NO: 6851 - protein, 13 aa, Artificial Sequence
  Cyclic GFR-binding peptide
KYLMSIPSLETPV

SEQ ID NO: 6852 - protein, 21 aa, Artificial Sequence
  Cyclic GFR-binding peptide
  MOD_RES (15)..(16): Xaa is C or S
DYYLVSTASLQTPAXXPKPVT

SEQ ID NO: 6853 - protein, 16 aa, Artificial Sequence
  Cyclic GFR-binding peptide
VKPTRGVFYLISIANL

SEQ ID NO: 6854 - protein, 21 aa, Artificial Sequence
  Cyclic GFR-binding peptide
  MOD_RES (15)..(16): Xaa is C or S
DFYLVSIANLKTPAXXAKPVA

SEQ ID NO: 6855 - protein, 13 aa, Artificial Sequence
  Cyclic GFR-binding peptide
FYLVSIANLKTPV

SEQ ID NO: 6856 - protein, 17 aa, Artificial Sequence
  Cyclic GFR-binding peptide
VVKDYEDFYLMSIANLE

SEQ ID NO: 6857 - protein, 14 aa, Artificial Sequence
  Cyclic GFR-binding peptide
  MOD_RES (14)..(14): Xaa is C or S
KYLISIPSLDQSVX

SEQ ID NO: 6858 - protein, 19 aa, Artificial Sequence
  Cyclic GFR-binding peptide
  MOD_RES (14)..(15): Xaa is C or S
FYLVSIANLKTPAXXAKPV

SEQ ID NO: 6859 - protein, 24 aa, Artificial Sequence
  Cyclic GFR-binding peptide
  MOD_RES (18)..(19): Xaa is C or S
SSDDKYLVSIPSLKTPAXXPKPVY

SEQ ID NO: 6860 - protein, 15 aa, Artificial Sequence
  Cyclic GFR-binding peptide
IVNNSSDKYLVSIPS

SEQ ID NO: 6861 - protein, 25 aa, Artificial Sequence
  Cyclic GFR-binding peptide
  MOD_RES (19)..(20): Xaa is C or S
PKRGVFYLISIANLAQPVXXPAASA

SEQ ID NO: 6862 - protein, 21 aa, Artificial Sequence
  Cyclic GFR-binding peptide
  MOD_RES (17)..(17): Xaa is C or S
EKYLVSIPSLQVQTPRXQVNR

SEQ ID NO: 6863 - protein, 16 aa, Artificial Sequence
  Cyclic GFR-binding peptide
  MOD_RES (16)..(16): Xaa is C or S
FYLVSIANLQVQTPRX

SEQ ID NO: 6864 - protein, 21 aa, Artificial Sequence
  Cyclic GFR-binding peptide
  MOD_RES (15)..(16): Xaa is C or S
DKYLVSIPSLKTPAXXPKPVY

SEQ ID NO: 6865 - protein, 15 aa, Artificial Sequence
  Cyclic GFR-binding peptide
VVKDYEDKYLMSIPS

SEQ ID NO: 6866 - protein, 27 aa, Artificial Sequence
  Cyclic GFR-binding peptide
  MOD_RES (21)..(22): Xaa is C or S
IVNSSDDLYLVSIASLQTPAXXPKPVT

SEQ ID NO: 6867 - protein, 23 aa, Artificial Sequence
  Cyclic GFR-binding peptide
  MOD_RES (17)..(18): Xaa is C or S
SDDKYLVSIPSLQTPAXXPKPVT

SEQ ID NO: 6868 - protein, 19 aa, Artificial Sequence
  Cyclic GFR-binding peptide
  MOD_RES (14)..(15): Xaa is C or S
FYLISIANLDQPVXXPSAS

SEQ ID NO: 6869 - protein, 19 aa, Artificial Sequence
  Cyclic GFR-binding peptide
  MOD_RES (14)..(15): Xaa is C or S
LYLVSIASLKTPVXXAKGV

SEQ ID NO: 6870 - protein, 19 aa, Artificial Sequence
  Cyclic GFR-binding peptide
  MOD_RES (14)..(15): Xaa is C or S
KYLVSIPSLKTPAXXAKPV

SEQ ID NO: 6871 - protein, 17 aa, Artificial Sequence
  Cyclic GFR-binding peptide
IVNNSSDLYLVSIASLK

SEQ ID NO: 6872 - protein, 16 aa, Artificial Sequence
  Cyclic GFR-binding peptide
  MOD_RES (14)..(15): Xaa is C or S
FYLMSIANLETPVXXA

SEQ ID NO: 6873 - protein, 17 aa, Artificial Sequence
  Cyclic GFR-binding peptide
  MOD_RES (14)..(15): Xaa is C or S
YYLISTASLAQPVXXPA

SEQ ID NO: 6874 - protein, 27 aa, Artificial Sequence
  Cyclic GFR-binding peptide
  MOD_RES (21)..(22): Xaa is C or S
IVNSSDDLYLVSIASLKTPAXXPKPVY

SEQ ID NO: 6875 - protein, 20 aa, Artificial Sequence
  Cyclic GFR-binding peptide
  MOD_RES (14)..(15): Xaa is C or S
LYLVSIASLKTPAXXAKPVA

SEQ ID NO: 6876 - protein, 22 aa, Artificial Sequence
  Cyclic GFR-binding peptide
  MOD_RES (18)..(18): Xaa is C or S
IEFYLVSIANLQVQTPRXQVNR

SEQ ID NO: 6877 - protein, 19 aa, Artificial Sequence
  Cyclic GFR-binding peptide
IVNSSDDLYLVSIASLQTP

SEQ ID NO: 6878 - protein, 19 aa, Artificial Sequence
  Cyclic GFR-binding peptide
TPVGMDDYYLVSTASLKTP

SEQ ID NO: 6879 - protein, 17 aa, Artificial Sequence
  Cyclic GFR-binding peptide
VVKDYEDKYLMSIPSLE

SEQ ID NO: 6880 - protein, 17 aa, Artificial Sequence
  Cyclic GFR-binding peptide
  MOD_RES (14)..(15): Xaa is C or S
LYLISIASLAQPVXXPA

SEQ ID NO: 6881 - protein, 20 aa, Artificial Sequence
  Cyclic GFR-binding peptide
FIPKKRVIEYYLVSTASLQV

SEQ ID NO: 6882 - protein, 16 aa, Artificial Sequence
  Cyclic GFR-binding peptide
  MOD_RES (14)..(14): Xaa is C or S
LYLVSIASLKTPAXTP

SEQ ID NO: 6883 - protein, 15 aa, Artificial Sequence
  Cyclic GFR-binding peptide
IVNNSSDLYLVSIAS

SEQ ID NO: 6884 - protein, 25 aa, Artificial Sequence
  Cyclic GFR-binding peptide
  MOD_RES (19)..(20): Xaa is C or S
PKRGVKYLISIPSLAQPVXXPAASA

SEQ ID NO: 6885 - protein, 23 aa, Artificial Sequence
  Cyclic GFR-binding peptide
  MOD_RES (17)..(18): Xaa is C or S
KGIFYLISIANLDQSVXXPSASA

SEQ ID NO: 6886 - protein, 16 aa, Artificial Sequence
  Cyclic GFR-binding peptide
VKPTRGVLYLISIASL

SEQ ID NO: 6887 - protein, 24 aa, Artificial Sequence
  Cyclic GFR-binding peptide
  MOD_RES (18)..(19): Xaa is C or S
KRGVLYLISIASLAQPVXXPAASA

SEQ ID NO: 6888 - protein, 24 aa, Artificial Sequence
  Cyclic GFR-binding peptide
  MOD_RES (18)..(19): Xaa is C or S
NSSDKYLVSIPSLKTPAXXAKPVA

SEQ ID NO: 6889 - protein, 17 aa, Artificial Sequence
  Cyclic GFR-binding peptide
IKPTKGIKYLISIPSLD

SEQ ID NO: 6890 - protein, 17 aa, Artificial Sequence
  Cyclic GFR-binding peptide
  MOD_RES (14)..(15): Xaa is C or S
YYLVSTASLKTPAXXPK

SEQ ID NO: 6891 - protein, 22 aa, Artificial Sequence
  Cyclic GFR-binding peptide
  MOD_RES (16)..(17): Xaa is C or S
GVFYLISIANLAQPVXXPAASA

SEQ ID NO: 6892 - protein, 25 aa, Artificial Sequence
  Cyclic GFR-binding peptide
  MOD_RES (19)..(20): Xaa is C or S
VGMDDYYLVSTASLKTPVXXAKGVK

SEQ ID NO: 6893 - protein, 15 aa, Artificial Sequence
  Cyclic GFR-binding peptide
IVNSSDDYYLVSTAS

SEQ ID NO: 6894 - protein, 20 aa, Artificial Sequence
  Cyclic GFR-binding peptide
  MOD_RES (14)..(15): Xaa is C or S
LYLVSIASLKTPVXXAKGVK

SEQ ID NO: 6895 - protein, 23 aa, Artificial Sequence
  Cyclic GFR-binding peptide
  MOD_RES (17)..(17): Xaa is C or S
SDDLYLVSIASLKTPAXTPKTVH

SEQ ID NO: 6896 - protein, 16 aa, Artificial Sequence
  Cyclic GFR-binding peptide
  MOD_RES (14)..(15): Xaa is C or S
KYLVSIPSLKTPAXXA

SEQ ID NO: 6897 - protein, 19 aa, Artificial Sequence
  Cyclic GFR-binding peptide
FIPKKRVIELYLVSIASLQ

SEQ ID NO: 6898 - protein, 24 aa, Artificial Sequence
  Cyclic GFR-binding peptide
  MOD_RES (18)..(19): Xaa is C or S
ENEDFYLMSIANLETPVXXAKPIK

SEQ ID NO: 6899 - protein, 19 aa, Artificial Sequence
  Cyclic GFR-binding peptide
VKPKRGVFYLISIANLAQP

SEQ ID NO: 6900 - protein, 25 aa, Artificial Sequence
  Cyclic GFR-binding peptide
  MOD_RES (19)..(20): Xaa is C or S
NNSSDKYLVSIPSLKTPAXXAKPVA

SEQ ID NO: 6901 - protein, 23 aa, Artificial Sequence
  Cyclic GFR-binding peptide
  MOD_RES (17)..(18): Xaa is C or S
RGVKYLISIPSLDQPVXXPSASA

SEQ ID NO: 6902 - protein, 13 aa, Artificial Sequence
  Cyclic GFR-binding peptide
LYLVSIASLKTPV

SEQ ID NO: 6903 - protein, 16 aa, Artificial Sequence
  Cyclic GFR-binding peptide
  MOD_RES (14)..(15): Xaa is C or S
LYLVSIASLKTPAXXP

SEQ ID NO: 6904 - protein, 15 aa, Artificial Sequence
  Cyclic GFR-binding peptide
  MOD_RES (14)..(15): Xaa is C or S
YYLISTASLDQPVXX

SEQ ID NO: 6905 - protein, 15 aa, Artificial Sequence
  Cyclic GFR-binding peptide
VVKDYEDFYLMSIAN

SEQ ID NO: 6906 - protein, 20 aa, Artificial Sequence
  Cyclic GFR-binding peptide
  MOD_RES (14)..(15): Xaa is C or S
YYLVSTASLKTPVXXAKGVK

SEQ ID NO: 6907 - protein, 14 aa, Artificial Sequence
  Cyclic GFR-binding peptide
LYLVSIASLQVQTP

SEQ ID NO: 6908 - protein, 18 aa, Artificial Sequence
  Cyclic GFR-binding peptide
TPVGMDDLYLVSIASLKT

SEQ ID NO: 6909 - protein, 16 aa, Artificial Sequence
  Cyclic GFR-binding peptide
IVNSSDDKYLVSIPSL

SEQ ID NO: 6910 - protein, 16 aa, Artificial Sequence
  Cyclic GFR-binding peptide
VKPKRGVKYLISIPSL

SEQ ID NO: 6911 - protein, 13 aa, Artificial Sequence
  Cyclic GFR-binding peptide
FYLISIANLDQSV

SEQ ID NO: 6912 - protein, 16 aa, Artificial Sequence
  Cyclic GFR-binding peptide
  MOD_RES (14)..(15): Xaa is C or S
KYLISIPSLDQPVXXP

SEQ ID NO: 6913 - protein, 15 aa, Artificial Sequence
  Cyclic GFR-binding peptide
  MOD_RES (14)..(15): Xaa is C or S
KYLISIPSLDQSVXX

SEQ ID NO: 6914 - protein, 27 aa, Artificial Sequence
  Cyclic GFR-binding peptide
  MOD_RES (21)..(22): Xaa is C or S
IVNSSDDKYLVSIPSLQTPAXXPKPVT

SEQ ID NO: 6915 - protein, 26 aa, Artificial Sequence
  Cyclic GFR-binding peptide
  MOD_RES (20)..(21): Xaa is C or S
VKENEDKYLMSIPSLETPVXXAKPIK

SEQ ID NO: 6916 - protein, 22 aa, Artificial Sequence
  Cyclic GFR-binding peptide
  MOD_RES (16)..(17): Xaa is C or S
DDLYLVSIASLKTPVXXAKGVK

SEQ ID NO: 6917 - protein, 17 aa, Artificial Sequence
  Cyclic GFR-binding peptide
  MOD_RES (14)..(14): Xaa is C or S
KYLVSIPSLKTPAXTPK

SEQ ID NO: 6918 - protein, 19 aa, Artificial Sequence
  Cyclic GFR-binding peptide
IVNSSDDLYLVSIASLKTP

SEQ ID NO: 6919 - protein, 14 aa, Artificial Sequence
  Cyclic GFR-binding peptide
  MOD_RES (14)..(14): Xaa is C or S
YYLISTASLDQSVX

SEQ ID NO: 6920 - protein, 13 aa, Artificial Sequence
  Cyclic GFR-binding peptide
YYLMSTASLETPV

SEQ ID NO: 6921 - protein, 16 aa, Artificial Sequence
  Cyclic GFR-binding peptide
VKPTRGVKYLISIPSL

SEQ ID NO: 6922 - protein, 15 aa, Artificial Sequence
  Cyclic GFR-binding peptide
  MOD_RES (14)..(15): Xaa is C or S
KYLISIPSLAQPVXX

SEQ ID NO: 6923 - protein, 19 aa, Artificial Sequence
  Cyclic GFR-binding peptide
VKPKRGVYYLISTASLAQP

SEQ ID NO: 6924 - protein, 24 aa, Artificial Sequence
  Cyclic GFR-binding peptide
  MOD_RES (18)..(19): Xaa is C or S
TRGVFYLISIANLDQPVXXPSASA

SEQ ID NO: 6925 - protein, 19 aa, Artificial Sequence
  Cyclic GFR-binding peptide
FIPKKRVIEFYLVSIANLQ

SEQ ID NO: 6926 - protein, 17 aa, Artificial Sequence
  Cyclic GFR-binding peptide
IVNSSDDYYLVSTASLQ

SEQ ID NO: 6927 - protein, 16 aa, Artificial Sequence
  Cyclic GFR-binding peptide
  MOD_RES (14)..(15): Xaa is C or S
YYLMSTASLETPVXXA

SEQ ID NO: 6928 - protein, 21 aa, Artificial Sequence
  Cyclic GFR-binding peptide
  MOD_RES (15)..(16): Xaa is C or S
DFYLVSIANLKTPVXXAKGVK

SEQ ID NO: 6929 - protein, 19 aa, Artificial Sequence
  Cyclic GFR-binding peptide
  MOD_RES (14)..(15): Xaa is C or S
FYLISIANLDQSVXXPSAS

SEQ ID NO: 6930 - protein, 17 aa, Artificial Sequence
  Cyclic GFR-binding peptide
  MOD_RES (14)..(14): Xaa is C or S
YYLVSTASLKTPAXTPK

SEQ ID NO: 6931 - protein, 21 aa, Artificial Sequence
  Cyclic GFR-binding peptide
  MOD_RES (15)..(16): Xaa is C or S
IYYLISTASLDQSVXXPSASA

SEQ ID NO: 6932 - protein, 17 aa, Artificial Sequence
  Cyclic GFR-binding peptide
IVNSSDDYYLVSTASLK

SEQ ID NO: 6933 - protein, 18 aa, Artificial Sequence
  Cyclic GFR-binding peptide
VKPKRGVFYLISIANLAQ

SEQ ID NO: 6934 - protein, 16 aa, Artificial Sequence
  Cyclic GFR-binding peptide
IKPTKGIFYLISIANL

SEQ ID NO: 6935 - protein, 18 aa, Artificial Sequence
  Cyclic GFR-binding peptide
  MOD_RES (14)..(15): Xaa is C or S
KYLISIPSLAQPVXXPAA

SEQ ID NO: 6936 - protein, 13 aa, Artificial Sequence
  Cyclic GFR-binding peptide
YYLVSTASLKTPV

SEQ ID NO: 6937 - protein, 20 aa, Artificial Sequence
  Cyclic GFR-binding peptide
  MOD_RES (14)..(15): Xaa is C or S
LYLVSIASLKTPAXXPKPVY

SEQ ID NO: 6938 - protein, 18 aa, Artificial Sequence
  Cyclic GFR-binding peptide
VKPKRGVLYLISIASLAQ

SEQ ID NO: 6939 - protein, 25 aa, Artificial Sequence
  Cyclic GFR-binding peptide
  MOD_RES (19)..(20): Xaa is C or S
NNSSDFYLVSIANLKTPAXXAKPVA

SEQ ID NO: 6940 - protein, 25 aa, Artificial Sequence
  Cyclic GFR-binding peptide
  MOD_RES (19)..(19): Xaa is C or S
NSSDDKYLVSIPSLKTPAXTPKTVH

SEQ ID NO: 6941 - protein, 20 aa, Artificial Sequence
  Cyclic GFR-binding peptide
  MOD_RES (14)..(15): Xaa is C or S
FYLVSIANLKTPVXXAKGVK

SEQ ID NO: 6942 - protein, 18 aa, Artificial Sequence
  Cyclic GFR-binding peptide
  MOD_RES (14)..(15): Xaa is C or S
KYLVSIPSLQTPAXXPKP

SEQ ID NO: 6943 - protein, 18 aa, Artificial Sequence
  Cyclic GFR-binding peptide
VVKDYEDYYLMSTASLET

SEQ ID NO: 6944 - protein, 26 aa, Artificial Sequence
  Cyclic GFR-binding peptide
  MOD_RES (20)..(21): Xaa is C or S
KPTKGIKYLISIPSLDQSVXXPSASA

SEQ ID NO: 6945 - protein, 13 aa, Artificial Sequence
  Cyclic GFR-binding peptide
KYLVSIPSLQTPA

SEQ ID NO: 6946 - protein, 27 aa, Artificial Sequence
  Cyclic GFR-binding peptide
  MOD_RES (21)..(22): Xaa is C or S
VKPTRGVKYLISIPSLDQPVXXPSASA

SEQ ID NO: 6947 - protein, 25 aa, Artificial Sequence
  Cyclic GFR-binding peptide
  MOD_RES (19)..(20): Xaa is C or S
PTRGVLYLISIASLDQPVXXPSASA

SEQ ID NO: 6948 - protein, 23 aa, Artificial Sequence
  Cyclic GFR-binding peptide
  MOD_RES (17)..(18): Xaa is C or S
SDDYYLVSTASLKTPAXXPKPVY

SEQ ID NO: 6949 - protein, 24 aa, Artificial Sequence
  Cyclic GFR-binding peptide
  MOD_RES (18)..(19): Xaa is C or S
NSSDFYLVSIANLKTPAXXAKPVA

SEQ ID NO: 6950 - protein, 14 aa, Artificial Sequence
  Cyclic GFR-binding peptide
  MOD_RES (14)..(14): Xaa is C or S
YYLISTASLAQPVX

SEQ ID NO: 6951 - protein, 25 aa, Artificial Sequence
  Cyclic GFR-binding peptide
  MOD_RES (19)..(20): Xaa is C or S
PKRGVLYLISIASLAQPVXXPAASA

SEQ ID NO: 6952 - protein, 26 aa, Artificial Sequence
  Cyclic GFR-binding peptide
  MOD_RES (20)..(21): Xaa is C or S
VKENEDYYLMSTASLETPVXXAKPIK

SEQ ID NO: 6953 - protein, 22 aa, Artificial Sequence
  Cyclic GFR-binding peptide
  MOD_RES (16)..(17): Xaa is C or S
EDFYLMSIANLETPVXXAKPIK

SEQ ID NO: 6954 - protein, 20 aa, Artificial Sequence
  Cyclic GFR-binding peptide
  MOD_RES (14)..(15): Xaa is C or S
YYLISTASLAQPVXXPAASA

SEQ ID NO: 6955 - protein, 25 aa, Artificial Sequence
  Cyclic GFR-binding peptide
  MOD_RES (19)..(19): Xaa is C or S
NSSDDYYLVSTASLKTPAXTPKTVH

SEQ ID NO: 6956 - protein, 18 aa, Artificial Sequence
  Cyclic GFR-binding peptide
  MOD_RES (14)..(15): Xaa is C or S
YYLVSTASLKTPAXXPKP

SEQ ID NO: 6957 - protein, 14 aa, Artificial Sequence
  Cyclic GFR-binding peptide
  MOD_RES (14)..(14): Xaa is C or S
KYLISIPSLDQPVX

SEQ ID NO: 6958 - protein, 23 aa, Artificial Sequence
  Cyclic GFR-binding peptide
  MOD_RES (17)..(18): Xaa is C or S
SDDYYLVSTASLQTPAXXPKPVT

SEQ ID NO: 6959 - protein, 27 aa, Artificial Sequence
  Cyclic GFR-binding peptide
  MOD_RES (21)..(22): Xaa is C or S
VKPKRGVYYLISTASLAQPVXXPAASA

SEQ ID NO: 6960 - protein, 15 aa, Artificial Sequence
  Cyclic GFR-binding peptide
  MOD_RES (14)..(15): Xaa is C or S
KYLISIPSLDQPVXX

SEQ ID NO: 6961 - protein, 23 aa, Artificial Sequence
  Cyclic GFR-binding peptide
  MOD_RES (17)..(18): Xaa is C or S
SDDKYLVSIPSLKTPAXXPKPVY

SEQ ID NO: 6962 - protein, 17 aa, Artificial Sequence
  Cyclic GFR-binding peptide
  MOD_RES (16)..(16): Xaa is C or S
FYLVSIANLQVQTPRXQ

SEQ ID NO: 6963 - protein, 13 aa, Artificial Sequence
  Cyclic GFR-binding peptide
FYLMSIANLETPV

SEQ ID NO: 6964 - protein, 20 aa, Artificial Sequence
  Cyclic GFR-binding peptide
  MOD_RES (14)..(15): Xaa is C or S
KYLISIPSLAQPVXXPAASA

SEQ ID NO: 6965 - protein, 23 aa, Artificial Sequence
  Cyclic GFR-binding peptide
  MOD_RES (17)..(18): Xaa is C or S
NEDKYLMSIPSLETPVXXAKPIK

SEQ ID NO: 6966 - protein, 18 aa, Artificial Sequence
  Cyclic GFR-binding peptide
  MOD_RES (14)..(15): Xaa is C or S
YYLVSTASLQTPAXXPKP

SEQ ID NO: 6967 - protein, 17 aa, Artificial Sequence
  Cyclic GFR-binding peptide
  MOD_RES (14)..(15): Xaa is C or S
YYLVSTASLQTPAXXPK

SEQ ID NO: 6968 - protein, 15 aa, Artificial Sequence
  Cyclic GFR-binding peptide
VKPTRGVYYLISTAS

SEQ ID NO: 6969 - protein, 25 aa, Artificial Sequence
  Cyclic GFR-binding peptide
  MOD_RES (21)..(21): Xaa is C or S
KRVIELYLVSIASLQVQTPRXQVNR

SEQ ID NO: 6970 - protein, 22 aa, Artificial Sequence
  Cyclic GFR-binding peptide
  MOD_RES (18)..(18): Xaa is C or S
IEYYLVSTASLQVQTPRXQVNR

SEQ ID NO: 6971 - protein, 17 aa, Artificial Sequence
  Cyclic GFR-binding peptide
VVKENEDYYLMSTASLE

SEQ ID NO: 6972 - protein, 16 aa, Artificial Sequence
  Cyclic GFR-binding peptide
  MOD_RES (14)..(15): Xaa is C or S
YYLVSTASLKTPVXXA

SEQ ID NO: 6973 - protein, 26 aa, Artificial Sequence
  Cyclic GFR-binding peptide
  MOD_RES (20)..(21): Xaa is C or S
KPTRGVKYLISIPSLDQPVXXPSASA

SEQ ID NO: 6974 - protein, 17 aa, Artificial Sequence
  Cyclic GFR-binding peptide
  MOD_RES (14)..(15): Xaa is C or S
KYLVSIPSLKTPAXXPK

SEQ ID NO: 6975 - protein, 21 aa, Artificial Sequence
  Cyclic GFR-binding peptide
  MOD_RES (15)..(16): Xaa is C or S
DLYLVSIASLKTPVXXAKGVK

SEQ ID NO: 6976 - protein, 17 aa, Artificial Sequence
  Cyclic GFR-binding peptide
  MOD_RES (14)..(15): Xaa is C or S
KYLVSIPSLQTPAXXPK

SEQ ID NO: 6977 - protein, 16 aa, Artificial Sequence
  Cyclic GFR-binding peptide
TPVGMDDYYLVSTASL

SEQ ID NO: 6978 - protein, 16 aa, Artificial Sequence
  Cyclic GFR-binding peptide
VKPKRGVFYLISIANL

SEQ ID NO: 6979 - protein, 14 aa, Artificial Sequence
  Cyclic GFR-binding peptide
  MOD_RES (14)..(14): Xaa is C or S
YYLISTASLDQPVX

SEQ ID NO: 6980 - protein, 14 aa, Artificial Sequence
  Cyclic GFR-binding peptide
  MOD_RES (14)..(14): Xaa is C or S
KYLISIPSLAQPVX

SEQ ID NO: 6981 - protein, 18 aa, Artificial Sequence
  Cyclic GFR-binding peptide
  MOD_RES (16)..(16): Xaa is C or S
KYLVSIPSLQVQTPRXQV

SEQ ID NO: 6982 - protein, 29 aa, Artificial Sequence
  Cyclic GFR-binding peptide
  MOD_RES (25)..(25): Xaa is C or S
FIPKKRVIEYYLVSTASLQVQTPRXQVNR

SEQ ID NO: 6983 - protein, 21 aa, Artificial Sequence
  Cyclic GFR-binding peptide
  MOD_RES (17)..(17): Xaa is C or S
EFYLVSIANLQVQTPRXQVNR

SEQ ID NO: 6984 - protein, 18 aa, Artificial Sequence
  Cyclic GFR-binding peptide
VKPKRGVKYLISIPSLAQ

SEQ ID NO: 6985 - protein, 20 aa, Artificial Sequence
  Cyclic GFR-binding peptide
  MOD_RES (16)..(16): Xaa is C or S
KYLVSIPSLQVQTPRXQVNR

SEQ ID NO: 6986 - protein, 18 aa, Artificial Sequence
  Cyclic GFR-binding peptide
  MOD_RES (14)..(14): Xaa is C or S
KYLVSIPSLKTPAXTPKT

SEQ ID NO: 6987 - protein, 23 aa, Artificial Sequence
  Cyclic GFR-binding peptide
  MOD_RES (17)..(18): Xaa is C or S
RGVFYLISIANLAQPVXXPAASA

SEQ ID NO: 6988 - protein, 18 aa, Artificial Sequence
  Cyclic GFR-binding peptide
  MOD_RES (14)..(15): Xaa is C or S
KYLVSIPSLKTPAXXPKP

SEQ ID NO: 6989 - protein, 26 aa, Artificial Sequence
  Cyclic GFR-binding peptide
  MOD_RES (20)..(21): Xaa is C or S
VNNSSDFYLVSIANLKTPAXXAKPVA

SEQ ID NO: 6990 - protein, 21 aa, Artificial Sequence
  Cyclic GFR-binding peptide
  MOD_RES (15)..(15): Xaa is C or S
DLYLVSIASLKTPAXTPKTVH

SEQ ID NO: 6991 - protein, 15 aa, Artificial Sequence
  Cyclic GFR-binding peptide
VVKENEDFYLMSIAN

SEQ ID NO: 6992 - protein, 13 aa, Artificial Sequence
  Cyclic GFR-binding peptide
KYLVSIPSLKTPA

SEQ ID NO: 6993 - protein, 18 aa, Artificial Sequence
  Cyclic GFR-binding peptide
TPVGMDDFYLVSIANLKT

SEQ ID NO: 6994 - protein, 18 aa, Artificial Sequence
  Cyclic GFR-binding peptide
FIPKKRVIELYLVSIASL

SEQ ID NO: 6995 - protein, 26 aa, Artificial Sequence
  Cyclic GFR-binding peptide
  MOD_RES (20)..(21): Xaa is C or S
PVGMDDYYLVSTASLKTPVXXAKGVK

SEQ ID NO: 6996 - protein, 13 aa, Artificial Sequence
  Cyclic GFR-binding peptide
YYLVSTASLQTPA

SEQ ID NO: 6997 - protein, 23 aa, Artificial Sequence
  Cyclic GFR-binding peptide
  MOD_RES (17)..(18): Xaa is C or S
MDDFYLVSIANLKTPVXXAKGVK

SEQ ID NO: 6998 - protein, 27 aa, Artificial Sequence
  Cyclic GFR-binding peptide
  MOD_RES (21)..(21): Xaa is C or S
IVNSSDDYYLVSTASLKTPAXTPKTVH

SEQ ID NO: 6999 - protein, 17 aa, Artificial Sequence
  Cyclic GFR-binding peptide
IVNNSSDKYLVSIPSLK

SEQ ID NO: 7000 - protein, 24 aa, Artificial Sequence
  Cyclic GFR-binding peptide
  MOD_RES (18)..(19): Xaa is C or S
KRGVFYLISIANLAQPVXXPAASA

SEQ ID NO: 7001 - protein, 22 aa, Artificial Sequence
  Cyclic GFR-binding peptide
  MOD_RES (6)..(7): Xaa is C or S
SIPKAXXVPTELSPISMLYKDE

SEQ ID NO: 7002 - protein, 15 aa, Artificial Sequence
  Cyclic GFR-binding peptide
NAISILYFIGKTPKI

SEQ ID NO: 7003 - protein, 13 aa, Artificial Sequence
  Cyclic GFR-binding peptide
APTQLSAISVLYL

SEQ ID NO: 7004 - protein, 26 aa, Artificial Sequence
  Cyclic GFR-binding peptide
  MOD_RES (5)..(5): Xaa is C or S
RNVQXRPTQVQLSPISVLYKEIVRKK

SEQ ID NO: 7005 - protein, 21 aa, Artificial Sequence
  Cyclic GFR-binding peptide
QVQLNAISVLYFEIVRKKPIF

SEQ ID NO: 7006 - protein, 15 aa, Artificial Sequence
  Cyclic GFR-binding peptide
SPISVLYKDDSSNVI

SEQ ID NO: 7007 - protein, 17 aa, Artificial Sequence
  Cyclic GFR-binding peptide
KLSAISVLYLDDSSNVI

SEQ ID NO: 7008 - protein, 19 aa, Artificial Sequence
  Cyclic GFR-binding peptide
  MOD_RES (5)..(6): Xaa is C or S
SASPXXVSQDLSAISILYL

SEQ ID NO: 7009 - protein, 18 aa, Artificial Sequence
  Cyclic GFR-binding peptide
LNAISVLYFEIVRKKPIF

SEQ ID NO: 7010 - protein, 24 aa, Artificial Sequence
  Cyclic GFR-binding peptide
  MOD_RES (6)..(7): Xaa is C or S
TVPKPXXAPTQLSATSVLYYDDSS

SEQ ID NO: 7011 - protein, 21 aa, Artificial Sequence
  Cyclic GFR-binding peptide
  MOD_RES (7)..(7): Xaa is C or S
HVTKPTXAPTKLSPISVLYKD

SEQ ID NO: 7012 - protein, 21 aa, Artificial Sequence
  Cyclic GFR-binding peptide
  MOD_RES (6)..(7): Xaa is C or S
SIPKAXXVPTELNAISMLYFD

SEQ ID NO: 7013 - protein, 17 aa, Artificial Sequence
  Cyclic GFR-binding peptide
DLSPISILYKVGRTPKV

SEQ ID NO: 7014 - protein, 23 aa, Artificial Sequence
  Cyclic GFR-binding peptide
  MOD_RES (6)..(7): Xaa is C or S
SIPKAXXVPTELSPISMLYKDEY

SEQ ID NO: 7015 - protein, 13 aa, Artificial Sequence
  Cyclic GFR-binding peptide
VPQALSAISILYL

SEQ ID NO: 7016 - protein, 22 aa, Artificial Sequence
  Cyclic GFR-binding peptide
  MOD_RES (6)..(7): Xaa is C or S
TVPKPXXAPTQLSATSVLYYDD

SEQ ID NO: 7017 - protein, 16 aa, Artificial Sequence
  Cyclic GFR-binding peptide
  MOD_RES (2)..(3): Xaa is C or S
PXXAPTQLSATSVLYY

SEQ ID NO: 7018 - protein, 15 aa, Artificial Sequence
  Cyclic GFR-binding peptide
SAISILYLIGKTPKI

SEQ ID NO: 7019 - protein, 26 aa, Artificial Sequence
  Cyclic GFR-binding peptide
  MOD_RES (6)..(7): Xaa is C or S
ASASPXXVPQDLNAISILYFVGRTPK

SEQ ID NO: 7020 - protein, 16 aa, Artificial Sequence
  Cyclic GFR-binding peptide
  MOD_RES (2)..(3): Xaa is C or S
PXXVPQALSATSILYY

SEQ ID NO: 7021 - protein, 23 aa, Artificial Sequence
  Cyclic GFR-binding peptide
  MOD_RES (6)..(7): Xaa is C or S
ASAAPXXVPQALSAISILYLVGR

SEQ ID NO: 7022 - protein, 24 aa, Artificial Sequence
  Cyclic GFR-binding peptide
  MOD_RES (6)..(7): Xaa is C or S
ASASPXXVPQDLSAISILYLVGRT

SEQ ID NO: 7023 - protein, 26 aa, Artificial Sequence
  Cyclic GFR-binding peptide
  MOD_RES (6)..(7): Xaa is C or S
ASAAPXXVPQALSAISILYLVGRKPK

SEQ ID NO: 7024 - protein, 22 aa, Artificial Sequence
  Cyclic GFR-binding peptide
  MOD_RES (6)..(7): Xaa is C or S
AVPKAXXAPTKLSPISVLYKDS

SEQ ID NO: 7025 - protein, 18 aa, Artificial Sequence
  Cyclic GFR-binding peptide
  MOD_RES (4)..(5): Xaa is C or S
ASPXXVPQDLSATSILYY

SEQ ID NO: 7026 - protein, 18 aa, Artificial Sequence
  Cyclic GFR-binding peptide
  MOD_RES (4)..(5): Xaa is C or S
AAPXXVPQALSATSILYY

SEQ ID NO: 7027 - protein, 18 aa, Artificial Sequence
  Cyclic GFR-binding peptide
  MOD_RES (4)..(5): Xaa is C or S
PKAXXAPTKLNAISVLYF

SEQ ID NO: 7028 - protein, 26 aa, Artificial Sequence
  Cyclic GFR-binding peptide
  MOD_RES (6)..(7): Xaa is C or S
AVPKAXXAPTKLSPISVLYKDSSNNV

SEQ ID NO: 7029 - protein, 18 aa, Artificial Sequence
  Cyclic GFR-binding peptide
TELSATSMLYYDENEKVV

SEQ ID NO: 7030 - protein, 24 aa, Artificial Sequence
  Cyclic GFR-binding peptide
  MOD_RES (6)..(7): Xaa is C or S
KIPKAXXVPTELSPISMLYKDENE

SEQ ID NO: 7031 - protein, 25 aa, Artificial Sequence
  Cyclic GFR-binding peptide
  MOD_RES (6)..(7): Xaa is C or S
ASASPXXVPQDLNAISILYFVGRTP

SEQ ID NO: 7032 - protein, 17 aa, Artificial Sequence
  Cyclic GFR-binding peptide
  MOD_RES (2)..(2): Xaa is C or S
QXRPTQVQLSPISVLYK

SEQ ID NO: 7033 - protein, 21 aa, Artificial Sequence
  Cyclic GFR-binding peptide
QVQLSAISVLYLEIVRKKPIF

SEQ ID NO: 7034 - protein, 18 aa, Artificial Sequence
  Cyclic GFR-binding peptide
  MOD_RES (3)..(3): Xaa is C or S
VQXRPTQVQLSAISVLYL

SEQ ID NO: 7035 - protein, 17 aa, Artificial Sequence
  Cyclic GFR-binding peptide
QLSAISVLYLDDSSNVI

SEQ ID NO: 7036 - protein, 21 aa, Artificial Sequence
  Cyclic GFR-binding peptide
  MOD_RES (6)..(7): Xaa is C or S
AVPKAXXAPTKLSAISVLYLD

SEQ ID NO: 7037 - protein, 24 aa, Artificial Sequence
  Cyclic GFR-binding peptide
  MOD_RES (6)..(7): Xaa is C or S
ASAAPXXVPQALSATSILYYVGRK

SEQ ID NO: 7038 - protein, 25 aa, Artificial Sequence
  Cyclic GFR-binding peptide
  MOD_RES (6)..(7): Xaa is C or S
ASASPXXVSQDLSATSILYYIGKTP

SEQ ID NO: 7039 - protein, 22 aa, Artificial Sequence
  Cyclic GFR-binding peptide
  MOD_RES (6)..(7): Xaa is C or S
ASASPXXVSQDLSPISILYKIG

SEQ ID NO: 7040 - protein, 25 aa, Artificial Sequence
  Cyclic GFR-binding peptide
  MOD_RES (6)..(7): Xaa is C or S
AVPKAXXAPTKLSAISVLYLDSSNN

SEQ ID NO: 7041 - protein, 17 aa, Artificial Sequence
  Cyclic GFR-binding peptide
  MOD_RES (2)..(2): Xaa is C or S
QXRPTQVQLSAISVLYL

SEQ ID NO: 7042 - protein, 15 aa, Artificial Sequence
  Cyclic GFR-binding peptide
NAISILYFVGRKPKV

SEQ ID NO: 7043 - protein, 23 aa, Artificial Sequence
  Cyclic GFR-binding peptide
  MOD_RES (6)..(7): Xaa is C or S
ASASPXXVPQDLSATSILYYVGR

SEQ ID NO: 7044 - protein, 16 aa, Artificial Sequence
  Cyclic GFR-binding peptide
LSAISVLYLDDSSNVI

SEQ ID NO: 7045 - protein, 23 aa, Artificial Sequence
  Cyclic GFR-binding peptide
  MOD_RES (5)..(5): Xaa is C or S
RNVQXRPTQVQLSAISVLYLEIV

SEQ ID NO: 7046 - protein, 13 aa, Artificial Sequence
  Cyclic GFR-binding peptide
VSQDLSAISILYL

SEQ ID NO: 7047 - protein, 21 aa, Artificial Sequence
  Cyclic GFR-binding peptide
  MOD_RES (6)..(7): Xaa is C or S
KIPKAXXVPTELNAISMLYFD

SEQ ID NO: 7048 - protein, 29 aa, Artificial Sequence
  Cyclic GFR-binding peptide
  MOD_RES (5)..(5): Xaa is C or S
RNVQXRPTQVQLSAISVLYLEIVRKKPIF

SEQ ID NO: 7049 - protein, 16 aa, Artificial Sequence
  Cyclic GFR-binding peptide
LSATSILYYIGKTPKI

SEQ ID NO: 7050 - protein, 20 aa, Artificial Sequence
  Cyclic GFR-binding peptide
  MOD_RES (6)..(7): Xaa is C or S
AVPKAXXAPTKLNAISVLYF

SEQ ID NO: 7051 - protein, 22 aa, Artificial Sequence
  Cyclic GFR-binding peptide
  MOD_RES (6)..(7): Xaa is C or S
TVPKPXXAPTQLSAISVLYLDD

SEQ ID NO: 7052 - protein, 15 aa, Artificial Sequence
  Cyclic GFR-binding peptide
  MOD_RES (1)..(2): Xaa is C or S
XXVPQALSAISILYL

SEQ ID NO: 7053 - protein, 15 aa, Artificial Sequence
  Cyclic GFR-binding peptide
SATSILYYVGRKPKV

SEQ ID NO: 7054 - protein, 24 aa, Artificial Sequence
  Cyclic GFR-binding peptide
  MOD_RES (6)..(7): Xaa is C or S
KVGKAXXVPTKLSAISVLYLDDMG

SEQ ID NO: 7055 - protein, 27 aa, Artificial Sequence
  Cyclic GFR-binding peptide
  MOD_RES (6)..(7): Xaa is C or S
ASAAPXXVPQALSAISILYLVGRKPKV

SEQ ID NO: 7056 - protein, 15 aa, Artificial Sequence
  Cyclic GFR-binding peptide
SATSILYYIGKTPKI

SEQ ID NO: 7057 - protein, 22 aa, Artificial Sequence
  Cyclic GFR-binding peptide
  MOD_RES (5)..(5): Xaa is C or S
RNVQXRPTQVQLSAISVLYLEI

SEQ ID NO: 7058 - protein, 15 aa, Artificial Sequence
  Cyclic GFR-binding peptide
  MOD_RES (2)..(2): Xaa is C or S
TXAPTKLSATSVLYY

SEQ ID NO: 7059 - protein, 22 aa, Artificial Sequence
  Cyclic GFR-binding peptide
  MOD_RES (7)..(7): Xaa is C or S
HVTKPTXAPTKLSPISVLYKDD

SEQ ID NO: 7060 - protein, 25 aa, Artificial Sequence
  Cyclic GFR-binding peptide
  MOD_RES (6)..(7): Xaa is C or S
KVGKAXXVPTKLSAISVLYLDDMGV

SEQ ID NO: 7061 - protein, 29 aa, Artificial Sequence
  Cyclic GFR-binding peptide
  MOD_RES (5)..(5): Xaa is C or S
RNVQXRPTQVQLNAISVLYFEIVRKKPIF

SEQ ID NO: 7062 - protein, 27 aa, Artificial Sequence
  Cyclic GFR-binding peptide
  MOD_RES (6)..(7): Xaa is C or S
SIPKAXXVPTELSPISMLYKDEYDKVV

SEQ ID NO: 7063 - protein, 27 aa, Artificial Sequence
  Cyclic GFR-binding peptide
  MOD_RES (6)..(7): Xaa is C or S
AVPKAXXAPTKLNAISVLYFDSSNNVI

SEQ ID NO: 7064 - protein, 20 aa, Artificial Sequence
  Cyclic GFR-binding peptide
  MOD_RES (6)..(7): Xaa is C or S
SIPKAXXVPTELSATSMLYY

SEQ ID NO: 7065 - protein, 17 aa, Artificial Sequence
  Cyclic GFR-binding peptide
DLNAISILYFVGRTPKV

SEQ ID NO: 7066 - protein, 17 aa, Artificial Sequence
  Cyclic GFR-binding peptide
  MOD_RES (3)..(4): Xaa is C or S
KAXXVPTELNAISMLYF

SEQ ID NO: 7067 - protein, 17 aa, Artificial Sequence
  Cyclic GFR-binding peptide
QLSPISVLYKDDSSNVI

SEQ ID NO: 7068 - protein, 20 aa, Artificial Sequence
  Cyclic GFR-binding peptide
  MOD_RES (6)..(7): Xaa is C or S
TVPKPXXAPTQLSAISVLYL

SEQ ID NO: 7069 - protein, 19 aa, Artificial Sequence
  Cyclic GFR-binding peptide
  MOD_RES (5)..(6): Xaa is C or S
VPKPXXAPTQLSAISVLYL

SEQ ID NO: 7070 - protein, 17 aa, Artificial Sequence
  Cyclic GFR-binding peptide
KLSPISVLYKDDSSNVI

SEQ ID NO: 7071 - protein, 17 aa, Artificial Sequence
  Cyclic GFR-binding peptide
  MOD_RES (3)..(4): Xaa is C or S
KAXXVPTELSPISMLYK

SEQ ID NO: 7072 - protein, 14 aa, Artificial Sequence
  Cyclic GFR-binding peptide
  MOD_RES (1)..(1): Xaa is C or S
XVPQALSAISILYL

SEQ ID NO: 7073 - protein, 20 aa, Artificial Sequence
  Cyclic GFR-binding peptide
  MOD_RES (6)..(7): Xaa is C or S
TVPKPXXAPTQLSPISVLYK

SEQ ID NO: 7074 - protein, 27 aa, Artificial Sequence
  Cyclic GFR-binding peptide
  MOD_RES (6)..(7): Xaa is C or S
AVPKAXXAPTKLSAISVLYLDSSNNVI

SEQ ID NO: 7075 - protein, 21 aa, Artificial Sequence
  Cyclic GFR-binding peptide
  MOD_RES (6)..(7): Xaa is C or S
ASASPXXVPQDLSATSILYYV

SEQ ID NO: 7076 - protein, 25 aa, Artificial Sequence
  Cyclic GFR-binding peptide
  MOD_RES (6)..(7): Xaa is C or S
KIPKAXXVPTELSPISMLYKDENEK

SEQ ID NO: 7077 - protein, 27 aa, Artificial Sequence
  Cyclic GFR-binding peptide
  MOD_RES (6)..(7): Xaa is C or S
TVPKPXXAPTQLSATSVLYYDDSSNVI

SEQ ID NO: 7078 - protein, 16 aa, Artificial Sequence
  Cyclic GFR-binding peptide
  MOD_RES (1)..(1): Xaa is C or S
XRPTQVQLSAISVLYL

SEQ ID NO: 7079 - protein, 19 aa, Artificial Sequence
  Cyclic GFR-binding peptide
  MOD_RES (5)..(6): Xaa is C or S
VPKAXXAPTKLSAISVLYL

SEQ ID NO: 7080 - protein, 16 aa, Artificial Sequence
  Cyclic GFR-binding peptide
LSATSILYYVGRKPKV

SEQ ID NO: 7081 - protein, 20 aa, Artificial Sequence
  Cyclic GFR-binding peptide
  MOD_RES (6)..(7): Xaa is C or S
AVPKAXXAPTKLSPISVLYK

SEQ ID NO: 7082 - protein, 27 aa, Artificial Sequence
  Cyclic GFR-binding peptide
  MOD_RES (6)..(7): Xaa is C or S
SIPKAXXVPTELNAISMLYFDEYDKVV

SEQ ID NO: 7083 - protein, 20 aa, Artificial Sequence
  Cyclic GFR-binding peptide
  MOD_RES (5)..(5): Xaa is C or S
RNVQXRPTQVQLNAISVLYF

SEQ ID NO: 7084 - protein, 19 aa, Artificial Sequence
  Cyclic GFR-binding peptide
PQDLSPISILYKVGRTPKV

SEQ ID NO: 7085 - protein, 23 aa, Artificial Sequence
  Cyclic GFR-binding peptide
  MOD_RES (5)..(5): Xaa is C or S
RNVQXRPTQVQLNAISVLYFEIV

SEQ ID NO: 7086 - protein, 19 aa, Artificial Sequence
  Cyclic GFR-binding peptide
  MOD_RES (5)..(6): Xaa is C or S
SASPXXVPQDLSAISILYL

SEQ ID NO: 7087 - protein, 26 aa, Artificial Sequence
  Cyclic GFR-binding peptide
  MOD_RES (6)..(7): Xaa is C or S
ASAAPXXVPQALSATSILYYVGRKPK

SEQ ID NO: 7088 - protein, 28 aa, Artificial Sequence
  Cyclic GFR-binding peptide
  MOD_RES (5)..(5): Xaa is C or S
RNVQXRPTQVQLSAISVLYLEIVRKKPI

SEQ ID NO: 7089 - protein, 16 aa, Artificial Sequence
  Cyclic GFR-binding peptide
LSAISILYLIGKTPKI

SEQ ID NO: 7090 - protein, 24 aa, Artificial Sequence
  Cyclic GFR-binding peptide
  MOD_RES (6)..(7): Xaa is C or S
KVGKAXXVPTKLNAISVLYFDDMG

SEQ ID NO: 7091 - protein, 26 aa, Artificial Sequence
  Cyclic GFR-binding peptide
  MOD_RES (6)..(7): Xaa is C or S
ASAAPXXVPQALSPISILYKVGRKPK

SEQ ID NO: 7092 - protein, 25 aa, Artificial Sequence
  Cyclic GFR-binding peptide
  MOD_RES (5)..(5): Xaa is C or S
RNVQXRPTQVQLSATSVLYYEIVRK

SEQ ID NO: 7093 - protein, 19 aa, Artificial Sequence
  Cyclic GFR-binding peptide
  MOD_RES (5)..(6): Xaa is C or S
SASPXXVSQDLSPISILYK

SEQ ID NO: 7094 - protein, 17 aa, Artificial Sequence
  Cyclic GFR-binding peptide
  MOD_RES (4)..(4): Xaa is C or S
KPTXAPTKLSAISVLYL

SEQ ID NO: 7095 - protein, 27 aa, Artificial Sequence
  Cyclic GFR-binding peptide
  MOD_RES (6)..(7): Xaa is C or S
KIPKAXXVPTELSPISMLYKDENEKVV

SEQ ID NO: 7096 - protein, 19 aa, Artificial Sequence
  Cyclic GFR-binding peptide
PTKLSPISVLYKDDSSNVI

SEQ ID NO: 7097 - protein, 17 aa, Artificial Sequence
  Cyclic GFR-binding peptide
ALSPISILYKVGRKPKV

SEQ ID NO: 7098 - protein, 20 aa, Artificial Sequence
  Cyclic GFR-binding peptide
  MOD_RES (6)..(7): Xaa is C or S
KIPKAXXVPTELNAISMLYF

SEQ ID NO: 7099 - protein, 24 aa, Artificial Sequence
  Cyclic GFR-binding peptide
  MOD_RES (6)..(7): Xaa is C or S
ASASPXXVSQDLSATSILYYIGKT

SEQ ID NO: 7100 - protein, 18 aa, Artificial Sequence
  Cyclic GFR-binding peptide
  MOD_RES (3)..(3): Xaa is C or S
VQXRPTQVQLNAISVLYF

SEQ ID NO: 7101 - protein, 27 aa, Artificial Sequence
  Cyclic GFR-binding peptide
  MOD_RES (5)..(5): Xaa is C or S
RNVQXRPTQVQLNAISVLYFEIVRKKP

SEQ ID NO: 7102 - protein, 22 aa, Artificial Sequence
  Cyclic GFR-binding peptide
  MOD_RES (6)..(7): Xaa is C or S
ASAAPXXVPQALSPISILYKVG

SEQ ID NO: 7103 - protein, 17 aa, Artificial Sequence
  Cyclic GFR-binding peptide
  MOD_RES (3)..(4): Xaa is C or S
KPXXAPTKLSAISVLYL

SEQ ID NO: 7104 - protein, 21 aa, Artificial Sequence
  Cyclic GFR-binding peptide
  MOD_RES (6)..(7): Xaa is C or S
YVPKPXXAPTKLSAISVLYLD

SEQ ID NO: 7105 - protein, 19 aa, Artificial Sequence
  Cyclic GFR-binding peptide
PTQLSPISVLYKDDSSNVI

SEQ ID NO: 7106 - protein, 18 aa, Artificial Sequence
  Cyclic GFR-binding peptide
  MOD_RES (4)..(5): Xaa is C or S
PKAXXAPTKLSAISVLYL

SEQ ID NO: 7107 - protein, 22 aa, Artificial Sequence
  Cyclic GFR-binding peptide
  MOD_RES (6)..(7): Xaa is C or S
KIPKAXXVPTELSPISMLYKDE

SEQ ID NO: 7108 - protein, 23 aa, Artificial Sequence
  Cyclic GFR-binding peptide
  MOD_RES (6)..(7): Xaa is C or S
ASAAPXXVPQALSATSILYYVGR

SEQ ID NO: 7109 - protein, 27 aa, Artificial Sequence
  Cyclic GFR-binding peptide
  MOD_RES (5)..(5): Xaa is C or S
RNVQXRPTQVQLSAISVLYLEIVRKKP

SEQ ID NO: 7110 - protein, 27 aa, Artificial Sequence
  Cyclic GFR-binding peptide
  MOD_RES (6)..(7): Xaa is C or S
ASAAPXXVPQALSPISILYKVGRKPKV

SEQ ID NO: 7111 - protein, 15 aa, Artificial Sequence
  Cyclic GFR-binding peptide
  MOD_RES (1)..(2): Xaa is C or S
XXVPQALNAISILYF

SEQ ID NO: 7112 - protein, 21 aa, Artificial Sequence
  Cyclic GFR-binding peptide
  MOD_RES (6)..(7): Xaa is C or S
KIPKAXXVPTELSPISMLYKD

SEQ ID NO: 7113 - protein, 13 aa, Artificial Sequence
  Cyclic GFR-binding peptide
VPQDLSAISILYL

SEQ ID NO: 7114 - protein, 13 aa, Artificial Sequence
  Cyclic GFR-binding peptide
VPQALNAISILYF

SEQ ID NO: 7115 - protein, 19 aa, Artificial Sequence
  Cyclic GFR-binding peptide
PQDLSAISILYLVGRTPKV

SEQ ID NO: 7116 - protein, 24 aa, Artificial Sequence
  Cyclic GFR-binding peptide
  MOD_RES (6)..(7): Xaa is C or S
ASASPXXVPQDLSPISILYKVGRT

SEQ ID NO: 7117 - protein, 19 aa, Artificial Sequence
  Cyclic GFR-binding peptide
PQALSPISILYKVGRKPKV

SEQ ID NO: 7118 - protein, 14 aa, Artificial Sequence
  Cyclic GFR-binding peptide
  MOD_RES (1)..(1): Xaa is C or S
XVPTELSATSMLYY

SEQ ID NO: 7119 - protein, 26 aa, Artificial Sequence
  Cyclic GFR-binding peptide
  MOD_RES (5)..(5): Xaa is C or S
RNVQXRPTQVQLSATSVLYYEIVRKK

SEQ ID NO: 7120 - protein, 17 aa, Artificial Sequence
  Cyclic GFR-binding peptide
ALNAISILYFVGRKPKV

SEQ ID NO: 7121 - protein, 25 aa, Artificial Sequence
  Cyclic GFR-binding peptide
  MOD_RES (7)..(7): Xaa is C or S
HVTKPTXAPTKLSAISVLYLDDSSN

SEQ ID NO: 7122 - protein, 16 aa, Artificial Sequence
  Cyclic GFR-binding peptide
  MOD_RES (2)..(3): Xaa is C or S
PXXVPQDLSATSILYY

SEQ ID NO: 7123 - protein, 25 aa, Artificial Sequence
  Cyclic GFR-binding peptide
  MOD_RES (6)..(7): Xaa is C or S
ASASPXXVPQDLSPISILYKVGRTP

SEQ ID NO: 7124 - protein, 16 aa, Artificial Sequence
  Cyclic GFR-binding peptide
LSATSILYYVGRTPKV

SEQ ID NO: 7125 - protein, 21 aa, Artificial Sequence
  Cyclic GFR-binding peptide
  MOD_RES (6)..(7): Xaa is C or S
ASASPXXVPQDLSAISILYLV

SEQ ID NO: 7126 - protein, 18 aa, Artificial Sequence
  Cyclic GFR-binding peptide
TKLSATSVLYYDDMGVPT

SEQ ID NO: 7127 - protein, 18 aa, Artificial Sequence
  Cyclic GFR-binding peptide
  MOD_RES (4)..(5): Xaa is C or S
GKAXXVPTKLSATSVLYY

SEQ ID NO: 7128 - protein, 27 aa, Artificial Sequence
  Cyclic GFR-binding peptide
  MOD_RES (6)..(7): Xaa is C or S
AVPKAXXAPTKLSPISVLYKDSSNNVI

SEQ ID NO: 7129 - protein, 16 aa, Artificial Sequence
  Cyclic GFR-binding peptide
  MOD_RES (2)..(3): Xaa is C or S
PXXVSQDLSATSILYY

SEQ ID NO: 7130 - protein, 25 aa, Artificial Sequence
  Cyclic GFR-binding peptide
  MOD_RES (6)..(7): Xaa is C or S
KIPKAXXVPTELNAISMLYFDENEK

SEQ ID NO: 7131 - protein, 20 aa, Artificial Sequence
  Cyclic GFR-binding peptide
  MOD_RES (6)..(7): Xaa is C or S
ASASPXXVPQDLSPISILYK

SEQ ID NO: 7132 - protein, 24 aa, Artificial Sequence
  Cyclic GFR-binding peptide
  MOD_RES (6)..(7): Xaa is C or S
SIPKAXXVPTELSATSMLYYDEYD

SEQ ID NO: 7133 - protein, 24 aa, Artificial Sequence
  Cyclic GFR-binding peptide
  MOD_RES (7)..(7): Xaa is C or S
HVTKPTXAPTKLSPISVLYKDDSS

SEQ ID NO: 7134 - protein, 19 aa, Artificial Sequence
  Cyclic GFR-binding peptide
  MOD_RES (5)..(6): Xaa is C or S
VGKAXXVPTKLNAISVLYF

SEQ ID NO: 7135 - protein, 26 aa, Artificial Sequence
  Cyclic GFR-binding peptide
  MOD_RES (5)..(5): Xaa is C or S
RNVQXRPTQVQLNAISVLYFEIVRKK

SEQ ID NO: 7136 - protein, 26 aa, Artificial Sequence
  Cyclic GFR-binding peptide
  MOD_RES (6)..(7): Xaa is C or S
KVGKAXXVPTKLSAISVLYLDDMGVP

SEQ ID NO: 7137 - protein, 26 aa, Artificial Sequence
  Cyclic GFR-binding peptide
  MOD_RES (6)..(7): Xaa is C or S
AVPKAXXAPTKLSAISVLYLDSSNNV

SEQ ID NO: 7138 - protein, 21 aa, Artificial Sequence
  Cyclic GFR-binding peptide
  MOD_RES (6)..(7): Xaa is C or S
ASAAPXXVPQALSPISILYKV

SEQ ID NO: 7139 - protein, 18 aa, Artificial Sequence
  Cyclic GFR-binding peptide
  MOD_RES (4)..(5): Xaa is C or S
PKPXXAPTQLSAISVLYL

SEQ ID NO: 7140 - protein, 15 aa, Artificial Sequence
  Cyclic GFR-binding peptide
  MOD_RES (1)..(2): Xaa is C or S
XXAPTQLSAISVLYL

SEQ ID NO: 7141 - protein, 20 aa, Artificial Sequence
  Cyclic GFR-binding peptide
  MOD_RES (6)..(7): Xaa is C or S
ASAAPXXVPQALNAISILYF

SEQ ID NO: 7142 - protein, 13 aa, Artificial Sequence
  Cyclic GFR-binding peptide
TQVQLSAISVLYL

SEQ ID NO: 7143 - protein, 19 aa, Artificial Sequence
  Cyclic GFR-binding peptide
  MOD_RES (6)..(6): Xaa is C or S
VTKPTXAPTKLSAISVLYL

SEQ ID NO: 7144 - protein, 20 aa, Artificial Sequence
  Cyclic GFR-binding peptide
  MOD_RES (6)..(7): Xaa is C or S
ASAAPXXVPQALSAISILYL

SEQ ID NO: 7145 - protein, 13 aa, Artificial Sequence
  Cyclic GFR-binding peptide
TQVQLNAISVLYF

SEQ ID NO: 7146 - protein, 25 aa, Artificial Sequence
  Cyclic GFR-binding peptide
  MOD_RES (6)..(7): Xaa is C or S
YVPKPXXAPTKLSATSVLYYDDSSN

SEQ ID NO: 7147 - protein, 24 aa, Artificial Sequence
  Cyclic GFR-binding peptide
  MOD_RES (6)..(7): Xaa is C or S
AVPKAXXAPTKLSAISVLYLDSSN

SEQ ID NO: 7148 - protein, 15 aa, Artificial Sequence
  Cyclic GFR-binding peptide
NAISILYFVGRTPKV

SEQ ID NO: 7149 - protein, 15 aa, Artificial Sequence
  Cyclic GFR-binding peptide
SAISVLYLDDSSNVI

SEQ ID NO: 7150 - protein, 21 aa, Artificial Sequence
  Cyclic GFR-binding peptide
  MOD_RES (6)..(7): Xaa is C or S
TVPKPXXAPTQLSAISVLYLD

SEQ ID NO: 7151 - protein, 17 aa, Artificial Sequence
  Cyclic GFR-binding peptide
DLSAISILYLVGRTPKV

SEQ ID NO: 7152 - protein, 19 aa, Artificial Sequence
  Cyclic GFR-binding peptide
SQDLSATSILYYIGKTPKI

SEQ ID NO: 7153 - protein, 27 aa, Artificial Sequence
  Cyclic GFR-binding peptide
  MOD_RES (6)..(7): Xaa is C or S
ASAAPXXVPQALNAISILYFVGRKPKV

SEQ ID NO: 7154 - protein, 25 aa, Artificial Sequence
  Cyclic GFR-binding peptide
  MOD_RES (6)..(7): Xaa is C or S
TVPKPXXAPTQLSAISVLYLDDSSN

SEQ ID NO: 7155 - protein, 27 aa, Artificial Sequence
  Cyclic GFR-binding peptide
  MOD_RES (5)..(5): Xaa is C or S
RNVQXRPTQVQLSPISVLYKEIVRKKP

SEQ ID NO: 7156 - protein, 26 aa, Artificial Sequence
  Cyclic GFR-binding peptide
  MOD_RES (6)..(7): Xaa is C or S
ASASPXXVSQDLSATSILYYIGKTPK

SEQ ID NO: 7157 - protein, 18 aa, Artificial Sequence
  Cyclic GFR-binding peptide
  MOD_RES (5)..(5): Xaa is C or S
TKPTXAPTKLSAISVLYL

SEQ ID NO: 7158 - protein, 20 aa, Artificial Sequence
  Cyclic GFR-binding peptide
  MOD_RES (5)..(5): Xaa is C or S
RNVQXRPTQVQLSAISVLYL

SEQ ID NO: 7159 - protein, 23 aa, Artificial Sequence
  Cyclic GFR-binding peptide
  MOD_RES (6)..(7): Xaa is C or S
AVPKAXXAPTKLSPISVLYKDSS

SEQ ID NO: 7160 - protein, 15 aa, Artificial Sequence
  Cyclic GFR-binding peptide
RPTQVQLSAISVLYL

SEQ ID NO: 7161 - protein, 21 aa, Artificial Sequence
  Cyclic GFR-binding peptide
  MOD_RES (6)..(7): Xaa is C or S
ASAAPXXVPQALNAISILYFV

SEQ ID NO: 7162 - protein, 26 aa, Artificial Sequence
  Cyclic GFR-binding peptide
  MOD_RES (6)..(7): Xaa is C or S
ASASPXXVSQDLNAISILYFIGKTPK

SEQ ID NO: 7163 - protein, 17 aa, Artificial Sequence
  Cyclic GFR-binding peptide
  MOD_RES (3)..(4): Xaa is C or S
KPXXAPTQLSAISVLYL

SEQ ID NO: 7164 - protein, 23 aa, Artificial Sequence
  Cyclic GFR-binding peptide
  MOD_RES (7)..(7): Xaa is C or S
HVTKPTXAPTKLSPISVLYKDDS

SEQ ID NO: 7165 - protein, 17 aa, Artificial Sequence
  Cyclic GFR-binding peptide
  MOD_RES (3)..(4): Xaa is C or S
KAXXVPTKLSATSVLYY

SEQ ID NO: 7166 - protein, 26 aa, Artificial Sequence
  Cyclic GFR-binding peptide
  MOD_RES (6)..(7): Xaa is C or S
YVPKPXXAPTKLSAISVLYLDDSSNV

SEQ ID NO: 7167 - protein, 22 aa, Artificial Sequence
  Cyclic GFR-binding peptide
  MOD_RES (6)..(7): Xaa is C or S
YVPKPXXAPTKLSPISVLYKDD

SEQ ID NO: 7168 - protein, 19 aa, Artificial Sequence
  Cyclic GFR-binding peptide
PTELNAISMLYFDENEKVV

SEQ ID NO: 7169 - protein, 27 aa, Artificial Sequence
  Cyclic GFR-binding peptide
  MOD_RES (6)..(7): Xaa is C or S
KIPKAXXVPTELNAISMLYFDENEKVV

SEQ ID NO: 7170 - protein, 15 aa, Artificial Sequence
  Cyclic GFR-binding peptide
  MOD_RES (1)..(2): Xaa is C or S
XXAPTKLSPISVLYK

SEQ ID NO: 7171 - protein, 23 aa, Artificial Sequence
  Cyclic GFR-binding peptide
  MOD_RES (6)..(7): Xaa is C or S
ASASPXXVSQDLSPISILYKIGK

SEQ ID NO: 7172 - protein, 19 aa, Artificial Sequence
  Cyclic GFR-binding peptide
QLSATSVLYYEIVRKKPIF

SEQ ID NO: 7173 - protein, 24 aa, Artificial Sequence
  Cyclic GFR-binding peptide
  MOD_RES (6)..(7): Xaa is C or S
TVPKPXXAPTQLSAISVLYLDDSS

SEQ ID NO: 7174 - protein, 25 aa, Artificial Sequence
  Cyclic GFR-binding peptide
  MOD_RES (6)..(7): Xaa is C or S
SIPKAXXVPTELNAISMLYFDEYDK

SEQ ID NO: 7175 - protein, 16 aa, Artificial Sequence
  Cyclic GFR-binding peptide
  MOD_RES (2)..(3): Xaa is C or S
PXXAPTKLSPISVLYK

SEQ ID NO: 7176 - protein, 23 aa, Artificial Sequence
  Cyclic GFR-binding peptide
  MOD_RES (6)..(7): Xaa is C or S
ASASPXXVPQDLNAISILYFVGR

SEQ ID NO: 7177 - protein, 19 aa, Artificial Sequence
  Cyclic GFR-binding peptide
  MOD_RES (5)..(6): Xaa is C or S
SAAPXXVPQALSPISILYK

SEQ ID NO: 7178 - protein, 26 aa, Artificial Sequence
  Cyclic GFR-binding peptide
  MOD_RES (7)..(7): Xaa is C or S
HVTKPTXAPTKLSAISVLYLDDSSNV

SEQ ID NO: 7179 - protein, 23 aa, Artificial Sequence
  Cyclic GFR-binding peptide
  MOD_RES (6)..(7): Xaa is C or S
KIPKAXXVPTELNAISMLYFDEN

SEQ ID NO: 7180 - protein, 19 aa, Artificial Sequence
  Cyclic GFR-binding peptide
  MOD_RES (5)..(6): Xaa is C or S
SAAPXXVPQALNAISILYF

SEQ ID NO: 7181 - protein, 13 aa, Artificial Sequence
  Cyclic GFR-binding peptide
VPQDLSPISILYK

SEQ ID NO: 7182 - protein, 19 aa, Artificial Sequence
  Cyclic GFR-binding peptide
  MOD_RES (4)..(4): Xaa is C or S
NVQXRPTQVQLSATSVLYY

SEQ ID NO: 7183 - protein, 25 aa, Artificial Sequence
  Cyclic GFR-binding peptide
  MOD_RES (6)..(7): Xaa is C or S
SIPKAXXVPTELSATSMLYYDEYDK

SEQ ID NO: 7184 - protein, 14 aa, Artificial Sequence
  Cyclic GFR-binding peptide
  MOD_RES (1)..(1): Xaa is C or S
XAPTQLSPISVLYK

SEQ ID NO: 7185 - protein, 15 aa, Artificial Sequence
  Cyclic GFR-binding peptide
SPISILYKVGRTPKV

SEQ ID NO: 7186 - protein, 19 aa, Artificial Sequence
  Cyclic GFR-binding peptide
PQALSAISILYLVGRKPKV

SEQ ID NO: 7187 - protein, 24 aa, Artificial Sequence
  Cyclic GFR-binding peptide
  MOD_RES (6)..(7): Xaa is C or S
KIPKAXXVPTELSATSMLYYDENE

SEQ ID NO: 7188 - protein, 23 aa, Artificial Sequence
  Cyclic GFR-binding peptide
  MOD_RES (6)..(7): Xaa is C or S
TVPKPXXAPTQLSAISVLYLDDS

SEQ ID NO: 7189 - protein, 22 aa, Artificial Sequence
  Cyclic GFR-binding peptide
  MOD_RES (6)..(7): Xaa is C or S
TVPKPXXAPTQLSPISVLYKDD

SEQ ID NO: 7190 - protein, 16 aa, Artificial Sequence
  Cyclic GFR-binding peptide
LNAISMLYFDEYDKVV

SEQ ID NO: 7191 - protein, 18 aa, Artificial Sequence
  Cyclic GFR-binding peptide
TELSPISMLYKDENEKVV

SEQ ID NO: 7192 - protein, 15 aa, Artificial Sequence
  Cyclic GFR-binding peptide
RPTQVQLSATSVLYY

SEQ ID NO: 7193 - protein, 14 aa, Artificial Sequence
  Cyclic GFR-binding peptide
PTQVQLSATSVLYY

SEQ ID NO: 7194 - protein, 19 aa, Artificial Sequence
  Cyclic GFR-binding peptide
PQDLSATSILYYVGRTPKV

SEQ ID NO: 7195 - protein, 17 aa, Artificial Sequence
  Cyclic GFR-binding peptide
  MOD_RES (3)..(4): Xaa is C or S
KAXXVPTELSATSMLYY

SEQ ID NO: 7196 - protein, 17 aa, Artificial Sequence
  Cyclic GFR-binding peptide
SAISVLYLEIVRKKPIF

SEQ ID NO: 7197 - protein, 16 aa, Artificial Sequence
  Cyclic GFR-binding peptide
  MOD_RES (1)..(1): Xaa is C or S
XRPTQVQLSPISVLYK

SEQ ID NO: 7198 - protein, 27 aa, Artificial Sequence
  Cyclic GFR-binding peptide
  MOD_RES (7)..(7): Xaa is C or S
HVTKPTXAPTKLSPISVLYKDDSSNVI

SEQ ID NO: 7199 - protein, 28 aa, Artificial Sequence
  Cyclic GFR-binding peptide
  MOD_RES (5)..(5): Xaa is C or S
RNVQXRPTQVQLSATSVLYYEIVRKKPI

SEQ ID NO: 7200 - protein, 25 aa, Artificial Sequence
  Cyclic GFR-binding peptide
  MOD_RES (6)..(7): Xaa is C or S
YVPKPXXAPTKLSPISVLYKDDSSN

SEQ ID NO: 7201 - protein, 21 aa, Artificial Sequence
  Cyclic GFR-binding peptide
  MOD_RES (5)..(5): Xaa is C or S
RNVQXRPTQVQLSATSVLYYE

SEQ ID NO: 7202 - protein, 18 aa, Artificial Sequence
  Cyclic GFR-binding peptide
QDLSPISILYKVGRTPKV

SEQ ID NO: 7203 - protein, 23 aa, Artificial Sequence
  Cyclic GFR-binding peptide
  MOD_RES (6)..(7): Xaa is C or S
YVPKPXXAPTKLSAISVLYLDDS

SEQ ID NO: 7204 - protein, 18 aa, Artificial Sequence
  Cyclic GFR-binding peptide
TKLSAISVLYLDDSSNVI

SEQ ID NO: 7205 - protein, 14 aa, Artificial Sequence
  Cyclic GFR-binding peptide
  MOD_RES (1)..(1): Xaa is C or S
XAPTKLSAISVLYL

SEQ ID NO: 7206 - protein, 19 aa, Artificial Sequence
  Cyclic GFR-binding peptide
  MOD_RES (5)..(6): Xaa is C or S
VPKPXXAPTKLSAISVLYL

SEQ ID NO: 7207 - protein, 19 aa, Artificial Sequence
  Cyclic GFR-binding peptide
  MOD_RES (5)..(6): Xaa is C or S
IPKAXXVPTELNAISMLYF

SEQ ID NO: 7208 - protein, 17 aa, Artificial Sequence
  Cyclic GFR-binding peptide
  MOD_RES (3)..(4): Xaa is C or S
SPXXVPQDLSAISILYL

SEQ ID NO: 7209 - protein, 27 aa, Artificial Sequence
  Cyclic GFR-binding peptide
  MOD_RES (5)..(5): Xaa is C or S
RNVQXRPTQVQLSATSVLYYEIVRKKP

SEQ ID NO: 7210 - protein, 14 aa, Artificial Sequence
  Cyclic GFR-binding peptide
  MOD_RES (1)..(1): Xaa is C or S
XVPTKLSATSVLYY

SEQ ID NO: 7211 - protein, 20 aa, Artificial Sequence
  Cyclic GFR-binding peptide
  MOD_RES (6)..(7): Xaa is C or S
SIPKAXXVPTELSPISMLYK

SEQ ID NO: 7212 - protein, 26 aa, Artificial Sequence
  Cyclic GFR-binding peptide
  MOD_RES (6)..(7): Xaa is C or S
SIPKAXXVPTELSATSMLYYDEYDKV

SEQ ID NO: 7213 - protein, 20 aa, Artificial Sequence
  Cyclic GFR-binding peptide
  MOD_RES (6)..(7): Xaa is C or S
SIPKAXXVPTELNAISMLYF

SEQ ID NO: 7214 - protein, 18 aa, Artificial Sequence
  Cyclic GFR-binding peptide
TQLSAISVLYLDDSSNVI

SEQ ID NO: 7215 - protein, 19 aa, Artificial Sequence
  Cyclic GFR-binding peptide
PTKLSAISVLYLDDMGVPT

SEQ ID NO: 7216 - protein, 15 aa, Artificial Sequence
  Cyclic GFR-binding peptide
  MOD_RES (1)..(2): Xaa is C or S
XXVPQDLSAISILYL

SEQ ID NO: 7217 - protein, 19 aa, Artificial Sequence
  Cyclic GFR-binding peptide
  MOD_RES (5)..(6): Xaa is C or S
SASPXXVPQDLSPISILYK

SEQ ID NO: 7218 - protein, 17 aa, Artificial Sequence
  Cyclic GFR-binding peptide
  MOD_RES (3)..(4): Xaa is C or S
KAXXVPTKLSAISVLYL

SEQ ID NO: 7219 - protein, 19 aa, Artificial Sequence
  Cyclic GFR-binding peptide
SQDLSPISILYKIGKTPKI

SEQ ID NO: 7220 - protein, 18 aa, Artificial Sequence
  Cyclic GFR-binding peptide
QDLNAISILYFVGRTPKV

SEQ ID NO: 7221 - protein, 20 aa, Artificial Sequence
  Cyclic GFR-binding peptide
  MOD_RES (6)..(7): Xaa is C or S
YVPKPXXAPTKLSPISVLYK

SEQ ID NO: 7222 - protein, 16 aa, Artificial Sequence
  Cyclic GFR-binding peptide
LNAISVLYFDSSNNVI

SEQ ID NO: 7223 - protein, 26 aa, Artificial Sequence
  Cyclic GFR-binding peptide
  MOD_RES (5)..(5): Xaa is C or S
RNVQXRPTQVQLSAISVLYLEIVRKK

SEQ ID NO: 7224 - protein, 22 aa, Artificial Sequence
  Cyclic GFR-binding peptide
  MOD_RES (6)..(7): Xaa is C or S
ASASPXXVPQDLSAISILYLVG

SEQ ID NO: 7225 - protein, 16 aa, Artificial Sequence
  Cyclic GFR-binding peptide
  MOD_RES (2)..(3): Xaa is C or S
AXXAPTKLNAISVLYF

SEQ ID NO: 7226 - protein, 16 aa, Artificial Sequence
  Cyclic GFR-binding peptide
  MOD_RES (3)..(3): Xaa is C or S
PTXAPTKLSATSVLYY

SEQ ID NO: 7227 - protein, 19 aa, Artificial Sequence
  Cyclic GFR-binding peptide
QLSPISVLYKEIVRKKPIF

SEQ ID NO: 7228 - protein, 19 aa, Artificial Sequence
  Cyclic GFR-binding peptide
PQDLNAISILYFVGRTPKV

SEQ ID NO: 7229 - protein, 15 aa, Artificial Sequence
  Cyclic GFR-binding peptide
  MOD_RES (1)..(2): Xaa is C or S
XXVPTKLSAISVLYL

SEQ ID NO: 7230 - protein, 21 aa, Artificial Sequence
  Cyclic GFR-binding peptide
  MOD_RES (6)..(7): Xaa is C or S
ASAAPXXVPQALSAISILYLV

SEQ ID NO: 7231 - protein, 20 aa, Artificial Sequence
  Cyclic GFR-binding peptide
VQLNAISVLYFEIVRKKPIF

SEQ ID NO: 7232 - protein, 14 aa, Artificial Sequence
  Cyclic GFR-binding peptide
  MOD_RES (1)..(1): Xaa is C or S
XVSQDLSAISILYL

SEQ ID NO: 7233 - protein, 15 aa, Artificial Sequence
  Cyclic GFR-binding peptide
  MOD_RES (1)..(2): Xaa is C or S
XXVPTKLNAISVLYF

SEQ ID NO: 7234 - protein, 19 aa, Artificial Sequence
  Cyclic GFR-binding peptide
  MOD_RES (5)..(6): Xaa is C or S
VGKAXXVPTKLSATSVLYY

SEQ ID NO: 7235 - protein, 22 aa, Artificial Sequence
  Cyclic GFR-binding peptide
  MOD_RES (6)..(7): Xaa is C or S
SIPKAXXVPTELSATSMLYYDE

SEQ ID NO: 7236 - protein, 20 aa, Artificial Sequence
  Cyclic GFR-binding peptide
  MOD_RES (6)..(7): Xaa is C or S
ASASPXXVPQDLSATSILYY

SEQ ID NO: 7237 - protein, 16 aa, Artificial Sequence
  Cyclic GFR-binding peptide
  MOD_RES (2)..(3): Xaa is C or S
PXXVPQDLSAISILYL

SEQ ID NO: 7238 - protein, 15 aa, Artificial Sequence
  Cyclic GFR-binding peptide
  MOD_RES (1)..(2): Xaa is C or S
XXVPTKLSATSVLYY

SEQ ID NO: 7239 - protein, 21 aa, Artificial Sequence
  Cyclic GFR-binding peptide
  MOD_RES (6)..(7): Xaa is C or S
YVPKPXXAPTKLSATSVLYYD

SEQ ID NO: 7240 - protein, 21 aa, Artificial Sequence
  Cyclic GFR-binding peptide
  MOD_RES (6)..(7): Xaa is C or S
TVPKPXXAPTQLSPISVLYKD

SEQ ID NO: 7241 - protein, 19 aa, Artificial Sequence
  Cyclic GFR-binding peptide
  MOD_RES (5)..(6): Xaa is C or S
VPKPXXAPTQLSPISVLYK

SEQ ID NO: 7242 - protein, 20 aa, Artificial Sequence
  Cyclic GFR-binding peptide
  MOD_RES (6)..(7): Xaa is C or S
ASASPXXVSQDLSAISILYL

SEQ ID NO: 7243 - protein, 18 aa, Artificial Sequence
  Cyclic GFR-binding peptide
  MOD_RES (4)..(5): Xaa is C or S
AAPXXVPQALNAISILYF

SEQ ID NO: 7244 - protein, 17 aa, Artificial Sequence
  Cyclic GFR-binding peptide
ALSAISILYLVGRKPKV

SEQ ID NO: 7245 - protein, 16 aa, Artificial Sequence
  Cyclic GFR-binding peptide
  MOD_RES (3)..(3): Xaa is C or S
PTXAPTKLSPISVLYK

SEQ ID NO: 7246 - protein, 18 aa, Artificial Sequence
  Cyclic GFR-binding peptide
TQLSPISVLYKDDSSNVI

SEQ ID NO: 7247 - protein, 15 aa, Artificial Sequence
  Cyclic GFR-binding peptide
  MOD_RES (1)..(2): Xaa is C or S
XXVSQDLNAISILYF

SEQ ID NO: 7248 - protein, 27 aa, Artificial Sequence
  Cyclic GFR-binding peptide
  MOD_RES (6)..(7): Xaa is C or S
KIPKAXXVPTELSATSMLYYDENEKVV

SEQ ID NO: 7249 - protein, 19 aa, Artificial Sequence
  Cyclic GFR-binding peptide
PTELSATSMLYYDENEKVV

SEQ ID NO: 7250 - protein, 15 aa, Artificial Sequence
  Cyclic GFR-binding peptide
SAISILYLVGRTPKV

SEQ ID NO: 7251 - protein, 21 aa, Artificial Sequence
  Cyclic GFR-binding peptide
  MOD_RES (6)..(7): Xaa is C or S
SIPKAXXVPTELSPISMLYKD

SEQ ID NO: 7252 - protein, 19 aa, Artificial Sequence
  Cyclic GFR-binding peptide
  MOD_RES (5)..(6): Xaa is C or S
VPKPXXAPTKLSPISVLYK

SEQ ID NO: 7253 - protein, 24 aa, Artificial Sequence
  Cyclic GFR-binding peptide
  MOD_RES (6)..(7): Xaa is C or S
ASASPXXVSQDLNAISILYFIGKT

SEQ ID NO: 7254 - protein, 25 aa, Artificial Sequence
  Cyclic GFR-binding peptide
  MOD_RES (6)..(7): Xaa is C or S
KIPKAXXVPTELSATSMLYYDENEK

SEQ ID NO: 7255 - protein, 20 aa, Artificial Sequence
  Cyclic GFR-binding peptide
VQLSAISVLYLEIVRKKPIF

SEQ ID NO: 7256 - protein, 13 aa, Artificial Sequence
  Cyclic GFR-binding peptide
VPQDLSATSILYY

SEQ ID NO: 7257 - protein, 27 aa, Artificial Sequence
  Cyclic GFR-binding peptide
  MOD_RES (7)..(7): Xaa is C or S
HVTKPTXAPTKLSAISVLYLDDSSNVI

SEQ ID NO: 7258 - protein, 20 aa, Artificial Sequence
  Cyclic GFR-binding peptide
  MOD_RES (6)..(7): Xaa is C or S
ASASPXXVSQDLNAISILYF

SEQ ID NO: 7259 - protein, 21 aa, Artificial Sequence
  Cyclic GFR-binding peptide
  MOD_RES (6)..(7): Xaa is C or S
ASASPXXVSQDLSAISILYLI

SEQ ID NO: 7260 - protein, 17 aa, Artificial Sequence
  Cyclic GFR-binding peptide
DLSATSILYYVGRTPKV

SEQ ID NO: 7261 - protein, 14 aa, Artificial Sequence
  Cyclic GFR-binding peptide
  MOD_RES (1)..(1): Xaa is C or S
XAPTQLSAISVLYL

SEQ ID NO: 7262 - protein, 18 aa, Artificial Sequence
  Cyclic GFR-binding peptide
  MOD_RES (4)..(5): Xaa is C or S
ASPXXVPQDLNAISILYF

SEQ ID NO: 7263 - protein, 20 aa, Artificial Sequence
  Cyclic GFR-binding peptide
  MOD_RES (6)..(7): Xaa is C or S
ASASPXXVSQDLSPISILYK

SEQ ID NO: 7264 - protein, 15 aa, Artificial Sequence
  Cyclic GFR-binding peptide
  MOD_RES (1)..(2): Xaa is C or S
XXVPTELSATSMLYY

SEQ ID NO: 7265 - protein, 18 aa, Artificial Sequence
  Cyclic GFR-binding peptide
TKLSPISVLYKDDSSNVI

SEQ ID NO: 7266 - protein, 24 aa, Artificial Sequence
  Cyclic GFR-binding peptide
  MOD_RES (6)..(7): Xaa is C or S
ASASPXXVPQDLSATSILYYVGRT

SEQ ID NO: 7267 - protein, 13 aa, Artificial Sequence
  Cyclic GFR-binding peptide
VSQDLSPISILYK

SEQ ID NO: 7268 - protein, 16 aa, Artificial Sequence
  Cyclic GFR-binding peptide
  MOD_RES (2)..(3): Xaa is C or S
PXXVPQDLNAISILYF

SEQ ID NO: 7269 - protein, 14 aa, Artificial Sequence
  Cyclic GFR-binding peptide
  MOD_RES (1)..(1): Xaa is C or S
XAPTQLSATSVLYY

SEQ ID NO: 7270 - protein, 16 aa, Artificial Sequence
  Cyclic GFR-binding peptide
  MOD_RES (1)..(1): Xaa is C or S
XRPTQVQLSATSVLYY

SEQ ID NO: 7271 - protein, 16 aa, Artificial Sequence
  Cyclic GFR-binding peptide
LSPISMLYKDEYDKVV

SEQ ID NO: 7272 - protein, 19 aa, Artificial Sequence
  Cyclic GFR-binding peptide
SQDLSAISILYLIGKTPKI

SEQ ID NO: 7273 - protein, 18 aa, Artificial Sequence
  Cyclic GFR-binding peptide
QDLSPISILYKIGKTPKI

SEQ ID NO: 7274 - protein, 16 aa, Artificial Sequence
  Cyclic GFR-binding peptide
  MOD_RES (2)..(3): Xaa is C or S
PXXAPTQLSPISVLYK

SEQ ID NO: 7275 - protein, 15 aa, Artificial Sequence
  Cyclic GFR-binding peptide
NAISVLYFDDMGVPT

SEQ ID NO: 7276 - protein, 18 aa, Artificial Sequence
  Cyclic GFR-binding peptide
TELNAISMLYFDENEKVV

SEQ ID NO: 7277 - protein, 17 aa, Artificial Sequence
  Cyclic GFR-binding peptide
KLSATSVLYYDDMGVPT

SEQ ID NO: 7278 - protein, 19 aa, Artificial Sequence
  Cyclic GFR-binding peptide
SQDLNAISILYFIGKTPKI

SEQ ID NO: 7279 - protein, 20 aa, Artificial Sequence
  Cyclic GFR-binding peptide
  MOD_RES (7)..(7): Xaa is C or S
HVTKPTXAPTKLSATSVLYY

SEQ ID NO: 7280 - protein, 14 aa, Artificial Sequence
  Cyclic GFR-binding peptide
PTQVQLSPISVLYK

SEQ ID NO: 7281 - protein, 16 aa, Artificial Sequence
  Cyclic GFR-binding peptide
  MOD_RES (2)..(3): Xaa is C or S
PXXVPQALNAISILYF

SEQ ID NO: 7282 - protein, 14 aa, Artificial Sequence
  Cyclic GFR-binding peptide
  MOD_RES (1)..(1): Xaa is C or S
XAPTKLSPISVLYK

SEQ ID NO: 7283 - protein, 22 aa, Artificial Sequence
  Cyclic GFR-binding peptide
  MOD_RES (6)..(7): Xaa is C or S
ASASPXXVSQDLSATSILYYIG

SEQ ID NO: 7284 - protein, 15 aa, Artificial Sequence
  Cyclic GFR-binding peptide
  MOD_RES (1)..(2): Xaa is C or S
XXVSQDLSAISILYL

SEQ ID NO: 7285 - protein, 27 aa, Artificial Sequence
  Cyclic GFR-binding peptide
  MOD_RES (6)..(7): Xaa is C or S
ASASPXXVPQDLSATSILYYVGRTPKV

SEQ ID NO: 7286 - protein, 15 aa, Artificial Sequence
  Cyclic GFR-binding peptide
SPISILYKVGRKPKV

SEQ ID NO: 7287 - protein, 26 aa, Artificial Sequence
  Cyclic GFR-binding peptide
  MOD_RES (6)..(7): Xaa is C or S
ASASPXXVSQDLSAISILYLIGKTPK

SEQ ID NO: 7288 - protein, 22 aa, Artificial Sequence
  Cyclic GFR-binding peptide
  MOD_RES (6)..(7): Xaa is C or S
ASASPXXVPQDLNAISILYFVG

SEQ ID NO: 7289 - protein, 22 aa, Artificial Sequence
  Cyclic GFR-binding peptide
  MOD_RES (7)..(7): Xaa is C or S
HVTKPTXAPTKLSATSVLYYDD

SEQ ID NO: 7290 - protein, 23 aa, Artificial Sequence
  Cyclic GFR-binding peptide
  MOD_RES (6)..(7): Xaa is C or S
ASASPXXVSQDLSATSILYYIGK

SEQ ID NO: 7291 - protein, 18 aa, Artificial Sequence
  Cyclic GFR-binding peptide
LSATSVLYYEIVRKKPIF

SEQ ID NO: 7292 - protein, 18 aa, Artificial Sequence
  Cyclic GFR-binding peptide
  MOD_RES (4)..(5): Xaa is C or S
ASPXXVSQDLSATSILYY

SEQ ID NO: 7293 - protein, 19 aa, Artificial Sequence
  Cyclic GFR-binding peptide
PTKLSPISVLYKDSSNNVI

SEQ ID NO: 7294 - protein, 19 aa, Artificial Sequence
  Cyclic GFR-binding peptide
PTELSPISMLYKDEYDKVV

SEQ ID NO: 7295 - protein, 18 aa, Artificial Sequence
  Cyclic GFR-binding peptide
  MOD_RES (4)..(5): Xaa is C or S
PKAXXVPTELSATSMLYY

SEQ ID NO: 7296 - protein, 17 aa, Artificial Sequence
  Cyclic GFR-binding peptide
  MOD_RES (3)..(4): Xaa is C or S
KAXXAPTKLSPISVLYK

SEQ ID NO: 7297 - protein, 21 aa, Artificial Sequence
  Cyclic GFR-binding peptide
  MOD_RES (6)..(7): Xaa is C or S
KVGKAXXVPTKLSATSVLYYD

SEQ ID NO: 7298 - protein, 13 aa, Artificial Sequence
  Cyclic GFR-binding peptide
VPQALSPISILYK

SEQ ID NO: 7299 - protein, 13 aa, Artificial Sequence
  Cyclic GFR-binding peptide
TQVQLSATSVLYY

SEQ ID NO: 7300 - protein, 15 aa, Artificial Sequence
  Cyclic GFR-binding peptide
  MOD_RES (1)..(2): Xaa is C or S
XXAPTQLSPISVLYK

SEQ ID NO: 7301 - protein, 19 aa, Artificial Sequence
  Cyclic GFR-binding peptide
  MOD_RES (5)..(6): Xaa is C or S
SAAPXXVPQALSAISILYL

SEQ ID NO: 7302 - protein, 15 aa, Artificial Sequence
  Cyclic GFR-binding peptide
  MOD_RES (1)..(2): Xaa is C or S
XXVPTELNAISMLYF

SEQ ID NO: 7303 - protein, 16 aa, Artificial Sequence
  Cyclic GFR-binding peptide
LSATSMLYYDENEKVV

SEQ ID NO: 7304 - protein, 27 aa, Artificial Sequence
  Cyclic GFR-binding peptide
  MOD_RES (6)..(7): Xaa is C or S
YVPKPXXAPTKLSATSVLYYDDSSNVI

SEQ ID NO: 7305 - protein, 20 aa, Artificial Sequence
  Cyclic GFR-binding peptide
  MOD_RES (6)..(7): Xaa is C or S
ASASPXXVPQDLSAISILYL

SEQ ID NO: 7306 - protein, 19 aa, Artificial Sequence
  Cyclic GFR-binding peptide
  MOD_RES (6)..(6): Xaa is C or S
VTKPTXAPTKLSPISVLYK

SEQ ID NO: 7307 - protein, 15 aa, Artificial Sequence
  Cyclic GFR-binding peptide
  MOD_RES (2)..(2): Xaa is C or S
TXAPTKLSAISVLYL

SEQ ID NO: 7308 - protein, 26 aa, Artificial Sequence
  Cyclic GFR-binding peptide
  MOD_RES (6)..(7): Xaa is C or S
KIPKAXXVPTELNAISMLYFDENEKV

SEQ ID NO: 7309 - protein, 18 aa, Artificial Sequence
  Cyclic GFR-binding peptide
  MOD_RES (4)..(5): Xaa is C or S
PKAXXAPTKLSPISVLYK

SEQ ID NO: 7310 - protein, 25 aa, Artificial Sequence
  Cyclic GFR-binding peptide
  MOD_RES (6)..(7): Xaa is C or S
TVPKPXXAPTQLSATSVLYYDDSSN

SEQ ID NO: 7311 - protein, 15 aa, Artificial Sequence
  Cyclic GFR-binding peptide
RPTQVQLSPISVLYK

SEQ ID NO: 7312 - protein, 23 aa, Artificial Sequence
  Cyclic GFR-binding peptide
  MOD_RES (6)..(7): Xaa is C or S
SIPKAXXVPTELNAISMLYFDEY

SEQ ID NO: 7313 - protein, 19 aa, Artificial Sequence
  Cyclic GFR-binding peptide
  MOD_RES (5)..(6): Xaa is C or S
VPKPXXAPTKLSATSVLYY

SEQ ID NO: 7314 - protein, 18 aa, Artificial Sequence
  Cyclic GFR-binding peptide
QDLSAISILYLVGRTPKV

SEQ ID NO: 7315 - protein, 20 aa, Artificial Sequence
  Cyclic GFR-binding peptide
  MOD_RES (6)..(7): Xaa is C or S
KIPKAXXVPTELSPISMLYK

SEQ ID NO: 7316 - protein, 26 aa, Artificial Sequence
  Cyclic GFR-binding peptide
  MOD_RES (6)..(7): Xaa is C or S
KVGKAXXVPTKLNAISVLYFDDMGVP

SEQ ID NO: 7317 - protein, 16 aa, Artificial Sequence
  Cyclic GFR-binding peptide
LSAISVLYLDSSNNVI

SEQ ID NO: 7318 - protein, 23 aa, Artificial Sequence
  Cyclic GFR-binding peptide
  MOD_RES (5)..(5): Xaa is C or S
RNVQXRPTQVQLSPISVLYKEIV

SEQ ID NO: 7319 - protein, 23 aa, Artificial Sequence
  Cyclic GFR-binding peptide
  MOD_RES (6)..(7): Xaa is C or S
ASASPXXVPQDLSAISILYLVGR

SEQ ID NO: 7320 - protein, 20 aa, Artificial Sequence
  Cyclic GFR-binding peptide
  MOD_RES (6)..(7): Xaa is C or S
ASASPXXVSQDLSATSILYY

SEQ ID NO: 7321 - protein, 15 aa, Artificial Sequence
  Cyclic GFR-binding peptide
SAISILYLVGRKPKV

SEQ ID NO: 7322 - protein, 25 aa, Artificial Sequence
  Cyclic GFR-binding peptide
  MOD_RES (6)..(7): Xaa is C or S
TVPKPXXAPTQLSPISVLYKDDSSN

SEQ ID NO: 7323 - protein, 16 aa, Artificial Sequence
  Cyclic GFR-binding peptide
LSATSVLYYDDSSNVI

SEQ ID NO: 7324 - protein, 20 aa, Artificial Sequence
  Cyclic GFR-binding peptide
  MOD_RES (6)..(7): Xaa is C or S
KIPKAXXVPTELSATSMLYY

SEQ ID NO: 7325 - protein, 16 aa, Artificial Sequence
  Cyclic GFR-binding peptide
  MOD_RES (2)..(3): Xaa is C or S
PXXVSQDLNAISILYF

SEQ ID NO: 7326 - protein, 14 aa, Artificial Sequence
  Cyclic GFR-binding peptide
  MOD_RES (1)..(1): Xaa is C or S
XVPTELNAISMLYF

SEQ ID NO: 7327 - protein, 13 aa, Artificial Sequence
  Cyclic GFR-binding peptide
TQVQLSPISVLYK

SEQ ID NO: 7328 - protein, 17 aa, Artificial Sequence
  Cyclic GFR-binding peptide
  MOD_RES (3)..(4): Xaa is C or S
SPXXVSQDLSAISILYL

SEQ ID NO: 7329 - protein, 20 aa, Artificial Sequence
  Cyclic GFR-binding peptide
  MOD_RES (6)..(7): Xaa is C or S
ASASPXXVPQDLNAISILYF

SEQ ID NO: 7330 - protein, 25 aa, Artificial Sequence
  Cyclic GFR-binding peptide
  MOD_RES (6)..(7): Xaa is C or S
SIPKAXXVPTELSPISMLYKDEYDK

SEQ ID NO: 7331 - protein, 14 aa, Artificial Sequence
  Cyclic GFR-binding peptide
  MOD_RES (1)..(1): Xaa is C or S
XVPTKLNAISVLYF

SEQ ID NO: 7332 - protein, 16 aa, Artificial Sequence
  Cyclic GFR-binding peptide
LSPISVLYKDSSNNVI

SEQ ID NO: 7333 - protein, 15 aa, Artificial Sequence
  Cyclic GFR-binding peptide
  MOD_RES (1)..(2): Xaa is C or S
XXAPTQLSATSVLYY

SEQ ID NO: 7334 - protein, 17 aa, Artificial Sequence
  Cyclic GFR-binding peptide
DLSATSILYYIGKTPKI

SEQ ID NO: 7335 - protein, 14 aa, Artificial Sequence
  Cyclic GFR-binding peptide
  MOD_RES (1)..(1): Xaa is C or S
XVPTKLSAISVLYL

SEQ ID NO: 7336 - protein, 19 aa, Artificial Sequence
  Cyclic GFR-binding peptide
PTQLSATSVLYYDDSSNVI

SEQ ID NO: 7337 - protein, 15 aa, Artificial Sequence
  Cyclic GFR-binding peptide
SPISILYKIGKTPKI

SEQ ID NO: 7338 - protein, 19 aa, Artificial Sequence
  Cyclic GFR-binding peptide
PTKLSATSVLYYDDSSNVI

SEQ ID NO: 7339 - protein, 18 aa, Artificial Sequence
  Cyclic GFR-binding peptide
QDLNAISILYFIGKTPKI

SEQ ID NO: 7340 - protein, 20 aa, Artificial Sequence
  Cyclic GFR-binding peptide
  MOD_RES (7)..(7): Xaa is C or S
HVTKPTXAPTKLSPISVLYK

SEQ ID NO: 7341 - protein, 24 aa, Artificial Sequence
  Cyclic GFR-binding peptide
  MOD_RES (6)..(7): Xaa is C or S
ASASPXXVSQDLSAISILYLIGKT

SEQ ID NO: 7342 - protein, 19 aa, Artificial Sequence
  Cyclic GFR-binding peptide
  MOD_RES (6)..(6): Xaa is C or S
VTKPTXAPTKLSATSVLYY

SEQ ID NO: 7343 - protein, 16 aa, Artificial Sequence
  Cyclic GFR-binding peptide
  MOD_RES (2)..(3): Xaa is C or S
PXXVSQDLSAISILYL

SEQ ID NO: 7344 - protein, 19 aa, Artificial Sequence
  Cyclic GFR-binding peptide
PTKLSAISVLYLDSSNNVI

SEQ ID NO: 7345 - protein, 24 aa, Artificial Sequence
  Cyclic GFR-binding peptide
  MOD_RES (6)..(7): Xaa is C or S
YVPKPXXAPTKLSATSVLYYDDSS

SEQ ID NO: 7346 - protein, 19 aa, Artificial Sequence
  Cyclic GFR-binding peptide
  MOD_RES (4)..(4): Xaa is C or S
NVQXRPTQVQLSPISVLYK

SEQ ID NO: 7347 - protein, 22 aa, Artificial Sequence
  Cyclic GFR-binding peptide
  MOD_RES (6)..(7): Xaa is C or S
KVGKAXXVPTKLSATSVLYYDD

SEQ ID NO: 7348 - protein, 23 aa, Artificial Sequence
  Cyclic GFR-binding peptide
  MOD_RES (5)..(5): Xaa is C or S
RNVQXRPTQVQLSATSVLYYEIV

SEQ ID NO: 7349 - protein, 21 aa, Artificial Sequence
  Cyclic GFR-binding peptide
  MOD_RES (6)..(7): Xaa is C or S
ASASPXXVSQDLNAISILYFI

SEQ ID NO: 7350 - protein, 27 aa, Artificial Sequence
  Cyclic GFR-binding peptide
  MOD_RES (6)..(7): Xaa is C or S
ASASPXXVSQDLSATSILYYIGKTPKI

SEQ ID NO: 7351 - protein, 17 aa, Artificial Sequence
  Cyclic GFR-binding peptide
  MOD_RES (3)..(4): Xaa is C or S
SPXXVSQDLNAISILYF

SEQ ID NO: 7352 - protein, 19 aa, Artificial Sequence
  Cyclic GFR-binding peptide
PTELNAISMLYFDEYDKVV

SEQ ID NO: 7353 - protein, 22 aa, Artificial Sequence
  Cyclic GFR-binding peptide
  MOD_RES (6)..(7): Xaa is C or S
SIPKAXXVPTELNAISMLYFDE

SEQ ID NO: 7354 - protein, 18 aa, Artificial Sequence
  Cyclic GFR-binding peptide
  MOD_RES (4)..(5): Xaa is C or S
PKAXXVPTELSPISMLYK

SEQ ID NO: 7355 - protein, 27 aa, Artificial Sequence
  Cyclic GFR-binding peptide
  MOD_RES (6)..(7): Xaa is C or S
KVGKAXXVPTKLNAISVLYFDDMGVPT

SEQ ID NO: 7356 - protein, 29 aa, Artificial Sequence
  Cyclic GFR-binding peptide
  MOD_RES (5)..(5): Xaa is C or S
RNVQXRPTQVQLSPISVLYKEIVRKKPIF

SEQ ID NO: 7357 - protein, 18 aa, Artificial Sequence
  Cyclic GFR-binding peptide
  MOD_RES (4)..(5): Xaa is C or S
ASPXXVSQDLSPISILYK

SEQ ID NO: 7358 - protein, 19 aa, Artificial Sequence
  Cyclic GFR-binding peptide
  MOD_RES (5)..(6): Xaa is C or S
SASPXXVSQDLSATSILYY

SEQ ID NO: 7359 - protein, 27 aa, Artificial Sequence
  Cyclic GFR-binding peptide
  MOD_RES (6)..(7): Xaa is C or S
KVGKAXXVPTKLSAISVLYLDDMGVPT

SEQ ID NO: 7360 - protein, 28 aa, Artificial Sequence
  Cyclic GFR-binding peptide
  MOD_RES (5)..(5): Xaa is C or S
RNVQXRPTQVQLSPISVLYKEIVRKKPI

SEQ ID NO: 7361 - protein, 21 aa, Artificial Sequence
  Cyclic GFR-binding peptide
  MOD_RES (6)..(7): Xaa is C or S
ASASPXXVSQDLSPISILYKI

SEQ ID NO: 7362 - protein, 18 aa, Artificial Sequence
  Cyclic GFR-binding peptide
QALSATSILYYVGRKPKV

SEQ ID NO: 7363 - protein, 22 aa, Artificial Sequence
  Cyclic GFR-binding peptide
  MOD_RES (6)..(7): Xaa is C or S
ASAAPXXVPQALSAISILYLVG

SEQ ID NO: 7364 - protein, 16 aa, Artificial Sequence
  Cyclic GFR-binding peptide
LNAISVLYFDDMGVPT

SEQ ID NO: 7365 - protein, 25 aa, Artificial Sequence
  Cyclic GFR-binding peptide
  MOD_RES (6)..(7): Xaa is C or S
YVPKPXXAPTKLSAISVLYLDDSSN

SEQ ID NO: 7366 - protein, 26 aa, Artificial Sequence
  Cyclic GFR-binding peptide
  MOD_RES (6)..(7): Xaa is C or S
TVPKPXXAPTQLSATSVLYYDDSSNV

SEQ ID NO: 7367 - protein, 24 aa, Artificial Sequence
  Cyclic GFR-binding peptide
  MOD_RES (6)..(7): Xaa is C or S
SIPKAXXVPTELSPISMLYKDEYD

SEQ ID NO: 7368 - protein, 21 aa, Artificial Sequence
  Cyclic GFR-binding peptide
  MOD_RES (6)..(7): Xaa is C or S
ASASPXXVPQDLSPISILYKV

SEQ ID NO: 7369 - protein, 17 aa, Artificial Sequence
  Cyclic GFR-binding peptide
ELSPISMLYKDENEKVV

SEQ ID NO: 7370 - protein, 13 aa, Artificial Sequence
  Cyclic GFR-binding peptide
VSQDLSATSILYY

SEQ ID NO: 7371 - protein, 22 aa, Artificial Sequence
  Cyclic GFR-binding peptide
  MOD_RES (6)..(7): Xaa is C or S
AVPKAXXAPTKLNAISVLYFDS

SEQ ID NO: 7372 - protein, 22 aa, Artificial Sequence
  Cyclic GFR-binding peptide
  MOD_RES (6)..(7): Xaa is C or S
KVGKAXXVPTKLNAISVLYFDD

SEQ ID NO: 7373 - protein, 20 aa, Artificial Sequence
  Cyclic GFR-binding peptide
  MOD_RES (6)..(7): Xaa is C or S
TVPKPXXAPTQLSATSVLYY

SEQ ID NO: 7374 - protein, 23 aa, Artificial Sequence
  Cyclic GFR-binding peptide
  MOD_RES (6)..(7): Xaa is C or S
KIPKAXXVPTELSATSMLYYDEN

SEQ ID NO: 7375 - protein, 22 aa, Artificial Sequence
  Cyclic GFR-binding peptide
  MOD_RES (6)..(7): Xaa is C or S
ASAAPXXVPQALSATSILYYVG

SEQ ID NO: 7376 - protein, 20 aa, Artificial Sequence
  Cyclic GFR-binding peptide
  MOD_RES (5)..(5): Xaa is C or S
RNVQXRPTQVQLSATSVLYY

SEQ ID NO: 7377 - protein, 23 aa, Artificial Sequence
  Cyclic GFR-binding peptide
  MOD_RES (6)..(7): Xaa is C or S
KVGKAXXVPTKLSAISVLYLDDM

SEQ ID NO: 7378 - protein, 18 aa, Artificial Sequence
  Cyclic GFR-binding peptide
TKLNAISVLYFDSSNNVI

SEQ ID NO: 7379 - protein, 16 aa, Artificial Sequence
  Cyclic GFR-binding peptide
LNAISMLYFDENEKVV

SEQ ID NO: 7380 - protein, 16 aa, Artificial Sequence
  Cyclic GFR-binding peptide
  MOD_RES (2)..(3): Xaa is C or S
PXXVPQALSAISILYL

SEQ ID NO: 7381 - protein, 16 aa, Artificial Sequence
  Cyclic GFR-binding peptide
  MOD_RES (2)..(3): Xaa is C or S
PXXAPTQLSAISVLYL

SEQ ID NO: 7382 - protein, 23 aa, Artificial Sequence
  Cyclic GFR-binding peptide
  MOD_RES (6)..(7): Xaa is C or S
ASAAPXXVPQALSPISILYKVGR

SEQ ID NO: 7383 - protein, 22 aa, Artificial Sequence
  Cyclic GFR-binding peptide
  MOD_RES (7)..(7): Xaa is C or S
HVTKPTXAPTKLSAISVLYLDD

SEQ ID NO: 7384 - protein, 18 aa, Artificial Sequence
  Cyclic GFR-binding peptide
TKLSAISVLYLDSSNNVI

SEQ ID NO: 7385 - protein, 15 aa, Artificial Sequence
  Cyclic GFR-binding peptide
SPISMLYKDENEKVV

SEQ ID NO: 7386 - protein, 25 aa, Artificial Sequence
  Cyclic GFR-binding peptide
  MOD_RES (6)..(7): Xaa is C or S
ASASPXXVPQDLSATSILYYVGRTP

SEQ ID NO: 7387 - protein, 15 aa, Artificial Sequence
  Cyclic GFR-binding peptide
SATSMLYYDEYDKVV

SEQ ID NO: 7388 - protein, 19 aa, Artificial Sequence
  Cyclic GFR-binding peptide
  MOD_RES (5)..(6): Xaa is C or S
VPKPXXAPTQLSATSVLYY

SEQ ID NO: 7389 - protein, 22 aa, Artificial Sequence
  Cyclic GFR-binding peptide
  MOD_RES (6)..(7): Xaa is C or S
ASASPXXVSQDLNAISILYFIG

SEQ ID NO: 7390 - protein, 14 aa, Artificial Sequence
  Cyclic GFR-binding peptide
PTQVQLNAISVLYF

SEQ ID NO: 7391 - protein, 26 aa, Artificial Sequence
  Cyclic GFR-binding peptide
  MOD_RES (6)..(7): Xaa is C or S
SIPKAXXVPTELNAISMLYFDEYDKV

SEQ ID NO: 7392 - protein, 26 aa, Artificial Sequence
  Cyclic GFR-binding peptide
  MOD_RES (7)..(7): Xaa is C or S
HVTKPTXAPTKLSPISVLYKDDSSNV

SEQ ID NO: 7393 - protein, 17 aa, Artificial Sequence
  Cyclic GFR-binding peptide
  MOD_RES (3)..(4): Xaa is C or S
SPXXVPQDLNAISILYF

SEQ ID NO: 7394 - protein, 16 aa, Artificial Sequence
  Cyclic GFR-binding peptide
  MOD_RES (2)..(3): Xaa is C or S
AXXAPTKLSAISVLYL

SEQ ID NO: 7395 - protein, 18 aa, Artificial Sequence
  Cyclic GFR-binding peptide
  MOD_RES (4)..(5): Xaa is C or S
ASPXXVPQDLSAISILYL

SEQ ID NO: 7396 - protein, 22 aa, Artificial Sequence
  Cyclic GFR-binding peptide
  MOD_RES (6)..(7): Xaa is C or S
YVPKPXXAPTKLSAISVLYLDD

SEQ ID NO: 7397 - protein, 18 aa, Artificial Sequence
  Cyclic GFR-binding peptide
  MOD_RES (4)..(5): Xaa is C or S
GKAXXVPTKLSAISVLYL

SEQ ID NO: 7398 - protein, 23 aa, Artificial Sequence
  Cyclic GFR-binding peptide
  MOD_RES (6)..(7): Xaa is C or S
AVPKAXXAPTKLNAISVLYFDSS

SEQ ID NO: 7399 - protein, 21 aa, Artificial Sequence
  Cyclic GFR-binding peptide
  MOD_RES (7)..(7): Xaa is C or S
HVTKPTXAPTKLSATSVLYYD

SEQ ID NO: 7400 - protein, 24 aa, Artificial Sequence
  Cyclic GFR-binding peptide
  MOD_RES (6)..(7): Xaa is C or S
ASASPXXVSQDLSPISILYKIGKT

SEQ ID NO: 7401 - protein, 27 aa, Artificial Sequence
  Cyclic GFR-binding peptide
  MOD_RES (6)..(7): Xaa is C or S
KVGKAXXVPTKLSATSVLYYDDMGVPT

SEQ ID NO: 7402 - protein, 18 aa, Artificial Sequence
  Cyclic GFR-binding peptide
  MOD_RES (3)..(3): Xaa is C or S
VQXRPTQVQLSATSVLYY

SEQ ID NO: 7403 - protein, 18 aa, Artificial Sequence
  Cyclic GFR-binding peptide
  MOD_RES (4)..(5): Xaa is C or S
PKAXXVPTELNAISMLYF

SEQ ID NO: 7404 - protein, 13 aa, Artificial Sequence
  Cyclic GFR-binding peptide
VPQALSATSILYY

SEQ ID NO: 7405 - protein, 17 aa, Artificial Sequence
  Cyclic GFR-binding peptide
KLSAISVLYLDDMGVPT

SEQ ID NO: 7406 - protein, 18 aa, Artificial Sequence
  Cyclic GFR-binding peptide
TELSPISMLYKDEYDKVV

SEQ ID NO: 7407 - protein, 18 aa, Artificial Sequence
  Cyclic GFR-binding peptide
QDLSAISILYLIGKTPKI

SEQ ID NO: 7408 - protein, 16 aa, Artificial Sequence
  Cyclic GFR-binding peptide
LSAISVLYLDDMGVPT

SEQ ID NO: 7409 - protein, 17 aa, Artificial Sequence
  Cyclic GFR-binding peptide
  MOD_RES (2)..(2): Xaa is C or S
QXRPTQVQLSATSVLYY

SEQ ID NO: 7410 - protein, 17 aa, Artificial Sequence
  Cyclic GFR-binding peptide
  MOD_RES (3)..(4): Xaa is C or S
APXXVPQALSPISILYK

SEQ ID NO: 7411 - protein, 24 aa, Artificial Sequence
  Cyclic GFR-binding peptide
  MOD_RES (7)..(7): Xaa is C or S
HVTKPTXAPTKLSATSVLYYDDSS

SEQ ID NO: 7412 - protein, 25 aa, Artificial Sequence
  Cyclic GFR-binding peptide
  MOD_RES (6)..(7): Xaa is C or S
ASASPXXVSQDLNAISILYFIGKTP

SEQ ID NO: 7413 - protein, 18 aa, Artificial Sequence
  Cyclic GFR-binding peptide
  MOD_RES (4)..(5): Xaa is C or S
GKAXXVPTKLNAISVLYF

SEQ ID NO: 7414 - protein, 27 aa, Artificial Sequence
  Cyclic GFR-binding peptide
  MOD_RES (6)..(7): Xaa is C or S
ASASPXXVSQDLSAISILYLIGKTPKI

SEQ ID NO: 7415 - protein, 17 aa, Artificial Sequence
  Cyclic GFR-binding peptide
SATSVLYYEIVRKKPIF

SEQ ID NO: 7416 - protein, 15 aa, Artificial Sequence
  Cyclic GFR-binding peptide
  MOD_RES (1)..(2): Xaa is C or S
XXVPQALSATSILYY

SEQ ID NO: 7417 - protein, 21 aa, Artificial Sequence
  Cyclic GFR-binding peptide
  MOD_RES (6)..(7): Xaa is C or S
ASASPXXVPQDLNAISILYFV

SEQ ID NO: 7418 - protein, 17 aa, Artificial Sequence
  Cyclic GFR-binding peptide
  MOD_RES (3)..(4): Xaa is C or S
APXXVPQALNAISILYF

SEQ ID NO: 7419 - protein, 18 aa, Artificial Sequence
  Cyclic GFR-binding peptide
  MOD_RES (4)..(5): Xaa is C or S
AAPXXVPQALSAISILYL

SEQ ID NO: 7420 - protein, 26 aa, Artificial Sequence
  Cyclic GFR-binding peptide
  MOD_RES (6)..(7): Xaa is C or S
TVPKPXXAPTQLSAISVLYLDDSSNV

SEQ ID NO: 7421 - protein, 18 aa, Artificial Sequence
  Cyclic GFR-binding peptide
QDLSATSILYYVGRTPKV

SEQ ID NO: 7422 - protein, 26 aa, Artificial Sequence
  Cyclic GFR-binding peptide
  MOD_RES (6)..(7): Xaa is C or S
YVPKPXXAPTKLSATSVLYYDDSSNV

SEQ ID NO: 7423 - protein, 19 aa, Artificial Sequence
  Cyclic GFR-binding peptide
PTKLNAISVLYFDSSNNVI

SEQ ID NO: 7424 - protein, 20 aa, Artificial Sequence
  Cyclic GFR-binding peptide
  MOD_RES (7)..(7): Xaa is C or S
HVTKPTXAPTKLSAISVLYL

SEQ ID NO: 7425 - protein, 18 aa, Artificial Sequence
  Cyclic GFR-binding peptide
  MOD_RES (4)..(5): Xaa is C or S
ASPXXVPQDLSPISILYK

SEQ ID NO: 7426 - protein, 13 aa, Artificial Sequence
  Cyclic GFR-binding peptide
APTKLSAISVLYL

SEQ ID NO: 7427 - protein, 19 aa, Artificial Sequence
  Cyclic GFR-binding peptide
  MOD_RES (5)..(6): Xaa is C or S
SAAPXXVPQALSATSILYY

SEQ ID NO: 7428 - protein, 21 aa, Artificial Sequence
  Cyclic GFR-binding peptide
QVQLSATSVLYYEIVRKKPIF

SEQ ID NO: 7429 - protein, 25 aa, Artificial Sequence
  Cyclic GFR-binding peptide
  MOD_RES (5)..(5): Xaa is C or S
RNVQXRPTQVQLNAISVLYFEIVRK

SEQ ID NO: 7430 - protein, 17 aa, Artificial Sequence
  Cyclic GFR-binding peptide
  MOD_RES (3)..(4): Xaa is C or S
KAXXAPTKLNAISVLYF

SEQ ID NO: 7431 - protein, 23 aa, Artificial Sequence
  Cyclic GFR-binding peptide
  MOD_RES (6)..(7): Xaa is C or S
KVGKAXXVPTKLSATSVLYYDDM

SEQ ID NO: 7432 - protein, 17 aa, Artificial Sequence
  Cyclic GFR-binding peptide
  MOD_RES (3)..(4): Xaa is C or S
SPXXVPQDLSPISILYK

SEQ ID NO: 7433 - protein, 26 aa, Artificial Sequence
  Cyclic GFR-binding peptide
  MOD_RES (6)..(7): Xaa is C or S
ASASPXXVPQDLSAISILYLVGRTPK

SEQ ID NO: 7434 - protein, 17 aa, Artificial Sequence
  Cyclic GFR-binding peptide
ELSATSMLYYDEYDKVV

SEQ ID NO: 7435 - protein, 19 aa, Artificial Sequence
  Cyclic GFR-binding peptide
  MOD_RES (5)..(6): Xaa is C or S
SASPXXVPQDLSATSILYY

SEQ ID NO: 7436 - protein, 23 aa, Artificial Sequence
  Cyclic GFR-binding peptide
  MOD_RES (6)..(7): Xaa is C or S
SIPKAXXVPTELSATSMLYYDEY

SEQ ID NO: 7437 - protein, 15 aa, Artificial Sequence
  Cyclic GFR-binding peptide
SAISVLYLDDMGVPT

SEQ ID NO: 7438 - protein, 16 aa, Artificial Sequence
  Cyclic GFR-binding peptide
  MOD_RES (2)..(3): Xaa is C or S
PXXVPQALSPISILYK

SEQ ID NO: 7439 - protein, 22 aa, Artificial Sequence
  Cyclic GFR-binding peptide
  MOD_RES (6)..(7): Xaa is C or S
ASASPXXVSQDLSAISILYLIG

SEQ ID NO: 7440 - protein, 16 aa, Artificial Sequence
  Cyclic GFR-binding peptide
  MOD_RES (2)..(3): Xaa is C or S
PXXAPTKLSATSVLYY

SEQ ID NO: 7441 - protein, 26 aa, Artificial Sequence
  Cyclic GFR-binding peptide
  MOD_RES (6)..(7): Xaa is C or S
ASAAPXXVPQALNAISILYFVGRKPK

SEQ ID NO: 7442 - protein, 22 aa, Artificial Sequence
  Cyclic GFR-binding peptide
  MOD_RES (6)..(7): Xaa is C or S
AVPKAXXAPTKLSAISVLYLDS

SEQ ID NO: 7443 - protein, 23 aa, Artificial Sequence
  Cyclic GFR-binding peptide
  MOD_RES (6)..(7): Xaa is C or S
AVPKAXXAPTKLSAISVLYLDSS

SEQ ID NO: 7444 - protein, 17 aa, Artificial Sequence
  Cyclic GFR-binding peptide
  MOD_RES (3)..(4): Xaa is C or S
KAXXVPTKLNAISVLYF

SEQ ID NO: 7445 - protein, 15 aa, Artificial Sequence
  Cyclic GFR-binding peptide
RPTQVQLNAISVLYF

SEQ ID NO: 7446 - protein, 27 aa, Artificial Sequence
  Cyclic GFR-binding peptide
  MOD_RES (6)..(7): Xaa is C or S
ASASPXXVSQDLSPISILYKIGKTPKI

SEQ ID NO: 7447 - protein, 22 aa, Artificial Sequence
  Cyclic GFR-binding peptide
  MOD_RES (6)..(7): Xaa is C or S
ASASPXXVPQDLSPISILYKVG

SEQ ID NO: 7448 - protein, 15 aa, Artificial Sequence
  Cyclic GFR-binding peptide
  MOD_RES (1)..(2): Xaa is C or S
XXVPQDLNAISILYF

SEQ ID NO: 7449 - protein, 14 aa, Artificial Sequence
  Cyclic GFR-binding peptide
  MOD_RES (1)..(1): Xaa is C or S
XVPTELSPISMLYK

SEQ ID NO: 7450 - protein, 17 aa, Artificial Sequence
  Cyclic GFR-binding peptide
  MOD_RES (3)..(4): Xaa is C or S
SPXXVSQDLSATSILYY

SEQ ID NO: 7451 - protein, 18 aa, Artificial Sequence
  Cyclic GFR-binding peptide
TKLSATSVLYYDDSSNVI

SEQ ID NO: 7452 - protein, 22 aa, Artificial Sequence
  Cyclic GFR-binding peptide
  MOD_RES (6)..(7): Xaa is C or S
ASASPXXVPQDLSATSILYYVG

SEQ ID NO: 7453 - protein, 18 aa, Artificial Sequence
  Cyclic GFR-binding peptide
TQLSATSVLYYDDSSNVI

SEQ ID NO: 7454 - protein, 21 aa, Artificial Sequence
  Cyclic GFR-binding peptide
  MOD_RES (5)..(5): Xaa is C or S
RNVQXRPTQVQLSAISVLYLE

SEQ ID NO: 7455 - protein, 17 aa, Artificial Sequence
  Cyclic GFR-binding peptide
ELNAISMLYFDENEKVV

SEQ ID NO: 7456 - protein, 17 aa, Artificial Sequence
  Cyclic GFR-binding peptide
SPISVLYKEIVRKKPIF

SEQ ID NO: 7457 - protein, 21 aa, Artificial Sequence
  Cyclic GFR-binding peptide
QVQLSPISVLYKEIVRKKPIF

SEQ ID NO: 7458 - protein, 21 aa, Artificial Sequence
  Cyclic GFR-binding peptide
  MOD_RES (6)..(7): Xaa is C or S
AVPKAXXAPTKLSPISVLYKD

SEQ ID NO: 7459 - protein, 24 aa, Artificial Sequence
  Cyclic GFR-binding peptide
  MOD_RES (6)..(7): Xaa is C or S
TVPKPXXAPTQLSPISVLYKDDSS

SEQ ID NO: 7460 - protein, 23 aa, Artificial Sequence
  Cyclic GFR-binding peptide
  MOD_RES (7)..(7): Xaa is C or S
HVTKPTXAPTKLSATSVLYYDDS

SEQ ID NO: 7461 - protein, 14 aa, Artificial Sequence
  Cyclic GFR-binding peptide
  MOD_RES (1)..(1): Xaa is C or S
XVPQDLSAISILYL

SEQ ID NO: 7462 - protein, 16 aa, Artificial Sequence
  Cyclic GFR-binding peptide
LSATSMLYYDEYDKVV

SEQ ID NO: 7463 - protein, 15 aa, Artificial Sequence
  Cyclic GFR-binding peptide
  MOD_RES (2)..(2): Xaa is C or S
TXAPTKLSPISVLYK

SEQ ID NO: 7464 - protein, 22 aa, Artificial Sequence
  Cyclic GFR-binding peptide
  MOD_RES (6)..(7): Xaa is C or S
KIPKAXXVPTELSATSMLYYDE

SEQ ID NO: 7465 - protein, 18 aa, Artificial Sequence
  Cyclic GFR-binding peptide
  MOD_RES (4)..(5): Xaa is C or S
PKPXXAPTKLSAISVLYL

SEQ ID NO: 7466 - protein, 18 aa, Artificial Sequence
  Cyclic GFR-binding peptide
TELNAISMLYFDEYDKVV

SEQ ID NO: 7467 - protein, 14 aa, Artificial Sequence
  Cyclic GFR-binding peptide
  MOD_RES (1)..(1): Xaa is C or S
XVSQDLNAISILYF

SEQ ID NO: 7468 - protein, 26 aa, Artificial Sequence
  Cyclic GFR-binding peptide
  MOD_RES (6)..(7): Xaa is C or S
TVPKPXXAPTQLSPISVLYKDDSSNV

SEQ ID NO: 7469 - protein, 21 aa, Artificial Sequence
  Cyclic GFR-binding peptide
  MOD_RES (6)..(7): Xaa is C or S
KIPKAXXVPTELSATSMLYYD

SEQ ID NO: 7470 - protein, 15 aa, Artificial Sequence
  Cyclic GFR-binding peptide
  MOD_RES (1)..(2): Xaa is C or S
XXVPTELSPISMLYK

SEQ ID NO: 7471 - protein, 26 aa, Artificial Sequence
  Cyclic GFR-binding peptide
  MOD_RES (6)..(7): Xaa is C or S
YVPKPXXAPTKLSPISVLYKDDSSNV

SEQ ID NO: 7472 - protein, 14 aa, Artificial Sequence
  Cyclic GFR-binding peptide
  MOD_RES (1)..(1): Xaa is C or S
XVPQDLNAISILYF

SEQ ID NO: 7473 - protein, 13 aa, Artificial Sequence
  Cyclic GFR-binding peptide
VPQDLNAISILYF

SEQ ID NO: 7474 - protein, 25 aa, Artificial Sequence
  Cyclic GFR-binding peptide
  MOD_RES (5)..(5): Xaa is C or S
RNVQXRPTQVQLSPISVLYKEIVRK

SEQ ID NO: 7475 - protein, 15 aa, Artificial Sequence
  Cyclic GFR-binding peptide
  MOD_RES (1)..(2): Xaa is C or S
XXVSQDLSATSILYY

SEQ ID NO: 7476 - protein, 15 aa, Artificial Sequence
  Cyclic GFR-binding peptide
NAISVLYFDSSNNVI

SEQ ID NO: 7477 - protein, 22 aa, Artificial Sequence
  Cyclic GFR-binding peptide
  MOD_RES (6)..(7): Xaa is C or S
YVPKPXXAPTKLSATSVLYYDD

SEQ ID NO: 7478 - protein, 16 aa, Artificial Sequence
  Cyclic GFR-binding peptide
LSPISMLYKDENEKVV

SEQ ID NO: 7479 - protein, 15 aa, Artificial Sequence
  Cyclic GFR-binding peptide
  MOD_RES (1)..(2): Xaa is C or S
XXAPTKLSAISVLYL

SEQ ID NO: 7480 - protein, 15 aa, Artificial Sequence
  Cyclic GFR-binding peptide
SATSVLYYDDMGVPT

SEQ ID NO: 7481 - protein, 16 aa, Artificial Sequence
  Cyclic GFR-binding peptide
  MOD_RES (2)..(3): Xaa is C or S
AXXVPTKLNAISVLYF

SEQ ID NO: 7482 - protein, 25 aa, Artificial Sequence
  Cyclic GFR-binding peptide
  MOD_RES (6)..(7): Xaa is C or S
ASASPXXVSQDLSPISILYKIGKTP

SEQ ID NO: 7483 - protein, 16 aa, Artificial Sequence
  Cyclic GFR-binding peptide
  MOD_RES (2)..(3): Xaa is C or S
PXXVSQDLSPISILYK

SEQ ID NO: 7484 - protein, 24 aa, Artificial Sequence
  Cyclic GFR-binding peptide
  MOD_RES (6)..(7): Xaa is C or S
SIPKAXXVPTELNAISMLYFDEYD

SEQ ID NO: 7485 - protein, 25 aa, Artificial Sequence
  Cyclic GFR-binding peptide
  MOD_RES (6)..(7): Xaa is C or S
KVGKAXXVPTKLNAISVLYFDDMGV

SEQ ID NO: 7486 - protein, 18 aa, Artificial Sequence
  Cyclic GFR-binding peptide
  MOD_RES (4)..(5): Xaa is C or S
ASPXXVSQDLNAISILYF

SEQ ID NO: 7487 - protein, 20 aa, Artificial Sequence
  Cyclic GFR-binding peptide
  MOD_RES (6)..(7): Xaa is C or S
YVPKPXXAPTKLSATSVLYY

SEQ ID NO: 7488 - protein, 16 aa, Artificial Sequence
  Cyclic GFR-binding peptide
  MOD_RES (2)..(3): Xaa is C or S
AXXVPTKLSAISVLYL

SEQ ID NO: 7489 - protein, 26 aa, Artificial Sequence
  Cyclic GFR-binding peptide
  MOD_RES (7)..(7): Xaa is C or S
HVTKPTXAPTKLSATSVLYYDDSSNV

SEQ ID NO: 7490 - protein, 25 aa, Artificial Sequence
  Cyclic GFR-binding peptide
  MOD_RES (6)..(7): Xaa is C or S
ASAAPXXVPQALSATSILYYVGRKP

SEQ ID NO: 7491 - protein, 19 aa, Artificial Sequence
  Cyclic GFR-binding peptide
PTELSPISMLYKDENEKVV

SEQ ID NO: 7492 - protein, 19 aa, Artificial Sequence
  Cyclic GFR-binding peptide
  MOD_RES (4)..(4): Xaa is C or S
NVQXRPTQVQLNAISVLYF

SEQ ID NO: 7493 - protein, 28 aa, Artificial Sequence
  Cyclic GFR-binding peptide
  MOD_RES (5)..(5): Xaa is C or S
RNVQXRPTQVQLNAISVLYFEIVRKKPI

SEQ ID NO: 7494 - protein, 18 aa, Artificial Sequence
  Cyclic GFR-binding peptide
LSPISVLYKEIVRKKPIF

SEQ ID NO: 7495 - protein, 17 aa, Artificial Sequence
  Cyclic GFR-binding peptide
KLNAISVLYFDDMGVPT

SEQ ID NO: 7496 - protein, 27 aa, Artificial Sequence
  Cyclic GFR-binding peptide
  MOD_RES (6)..(7): Xaa is C or S
YVPKPXXAPTKLSPISVLYKDDSSNVI

SEQ ID NO: 7497 - protein, 18 aa, Artificial Sequence
  Cyclic GFR-binding peptide
TKLSPISVLYKDSSNNVI

SEQ ID NO: 7498 - protein, 18 aa, Artificial Sequence
  Cyclic GFR-binding peptide
QDLSATSILYYIGKTPKI

SEQ ID NO: 7499 - protein, 19 aa, Artificial Sequence
  Cyclic GFR-binding peptide
  MOD_RES (5)..(6): Xaa is C or S
IPKAXXVPTELSATSMLYY

SEQ ID NO: 7500 - protein, 19 aa, Artificial Sequence
  Cyclic GFR-binding peptide
PTELSATSMLYYDEYDKVV

SEQ ID NO: 7501 - protein, 18 aa, Artificial Sequence
  Cyclic GFR-binding peptide
  MOD_RES (4)..(5): Xaa is C or S
ASPXXVSQDLSAISILYL

SEQ ID NO: 7502 - protein, 27 aa, Artificial Sequence
  Cyclic GFR-binding peptide
  MOD_RES (6)..(7): Xaa is C or S
ASASPXXVSQDLNAISILYFIGKTPKI

SEQ ID NO: 7503 - protein, 15 aa, Artificial Sequence
  Cyclic GFR-binding peptide
SATSMLYYDENEKVV

SEQ ID NO: 7504 - protein, 17 aa, Artificial Sequence
  Cyclic GFR-binding peptide
  MOD_RES (3)..(4): Xaa is C or S
SPXXVSQDLSPISILYK

SEQ ID NO: 7505 - protein, 17 aa, Artificial Sequence
  Cyclic GFR-binding peptide
NAISVLYFEIVRKKPIF

SEQ ID NO: 7506 - protein, 17 aa, Artificial Sequence
  Cyclic GFR-binding peptide
DLSAISILYLIGKTPKI

SEQ ID NO: 7507 - protein, 17 aa, Artificial Sequence
  Cyclic GFR-binding peptide
KLNAISVLYFDSSNNVI

SEQ ID NO: 7508 - protein, 14 aa, Artificial Sequence
  Cyclic GFR-binding peptide
  MOD_RES (1)..(1): Xaa is C or S
XVPQALNAISILYF

SEQ ID NO: 7509 - protein, 27 aa, Artificial Sequence
  Cyclic GFR-binding peptide
  MOD_RES (6)..(7): Xaa is C or S
ASASPXXVPQDLNAISILYFVGRTPKV

SEQ ID NO: 7510 - protein, 21 aa, Artificial Sequence
  Cyclic GFR-binding peptide
  MOD_RES (6)..(7): Xaa is C or S
SIPKAXXVPTELSATSMLYYD

SEQ ID NO: 7511 - protein, 17 aa, Artificial Sequence
  Cyclic GFR-binding peptide
  MOD_RES (3)..(4): Xaa is C or S
KAXXAPTKLSAISVLYL

SEQ ID NO: 7512 - protein, 21 aa, Artificial Sequence
  Cyclic GFR-binding peptide
  MOD_RES (6)..(7): Xaa is C or S
ASAAPXXVPQALSATSILYYV

SEQ ID NO: 7513 - protein, 17 aa, Artificial Sequence
  Cyclic GFR-binding peptide
DLNAISILYFIGKTPKI

SEQ ID NO: 7514 - protein, 25 aa, Artificial Sequence
  Cyclic GFR-binding peptide
  MOD_RES (6)..(7): Xaa is C or S
ASASPXXVSQDLSAISILYLIGKTP

SEQ ID NO: 7515 - protein, 23 aa, Artificial Sequence
  Cyclic GFR-binding peptide
  MOD_RES (6)..(7): Xaa is C or S
ASASPXXVSQDLSAISILYLIGK

SEQ ID NO: 7516 - protein, 20 aa, Artificial Sequence
  Cyclic GFR-binding peptide
VQLSPISVLYKEIVRKKPIF

SEQ ID NO: 7517 - protein, 22 aa, Artificial Sequence
  Cyclic GFR-binding peptide
  MOD_RES (5)..(5): Xaa is C or S
RNVQXRPTQVQLSPISVLYKEI

SEQ ID NO: 7518 - protein, 24 aa, Artificial Sequence
  Cyclic GFR-binding peptide
  MOD_RES (6)..(7): Xaa is C or S
ASAAPXXVPQALSPISILYKVGRK

SEQ ID NO: 7519 - protein, 26 aa, Artificial Sequence
  Cyclic GFR-binding peptide
  MOD_RES (6)..(7): Xaa is C or S
ASASPXXVPQDLSATSILYYVGRTPK

SEQ ID NO: 7520 - protein, 24 aa, Artificial Sequence
  Cyclic GFR-binding peptide
  MOD_RES (7)..(7): Xaa is C or S
HVTKPTXAPTKLSAISVLYLDDSS

SEQ ID NO: 7521 - protein, 19 aa, Artificial Sequence
  Cyclic GFR-binding peptide
  MOD_RES (5)..(6): Xaa is C or S
IPKAXXVPTELSPISMLYK

SEQ ID NO: 7522 - protein, 16 aa, Artificial Sequence
  Cyclic GFR-binding peptide
LSPISILYKIGKTPKI

SEQ ID NO: 7523 - protein, 27 aa, Artificial Sequence
  Cyclic GFR-binding peptide
  MOD_RES (6)..(7): Xaa is C or S
SIPKAXXVPTELSATSMLYYDEYDKVV

SEQ ID NO: 7524 - protein, 24 aa, Artificial Sequence
  Cyclic GFR-binding peptide
  MOD_RES (6)..(7): Xaa is C or S
YVPKPXXAPTKLSAISVLYLDDSS

SEQ ID NO: 7525 - protein, 26 aa, Artificial Sequence
  Cyclic GFR-binding peptide
  MOD_RES (6)..(7): Xaa is C or S
SIPKAXXVPTELSPISMLYKDEYDKV

SEQ ID NO: 7526 - protein, 17 aa, Artificial Sequence
  Cyclic GFR-binding peptide
  MOD_RES (3)..(4): Xaa is C or S
SPXXVPQDLSATSILYY

SEQ ID NO: 7527 - protein, 27 aa, Artificial Sequence
  Cyclic GFR-binding peptide
  MOD_RES (6)..(7): Xaa is C or S
ASASPXXVPQDLSAISILYLVGRTPKV

SEQ ID NO: 7528 - protein, 16 aa, Artificial Sequence
  Cyclic GFR-binding peptide
  MOD_RES (2)..(3): Xaa is C or S
AXXVPTELSPISMLYK

SEQ ID NO: 7529 - protein, 19 aa, Artificial Sequence
  Cyclic GFR-binding peptide
  MOD_RES (4)..(4): Xaa is C or S
NVQXRPTQVQLSAISVLYL

SEQ ID NO: 7530 - protein, 19 aa, Artificial Sequence
  Cyclic GFR-binding peptide
PTKLNAISVLYFDDMGVPT

SEQ ID NO: 7531 - protein, 24 aa, Artificial Sequence
  Cyclic GFR-binding peptide
  MOD_RES (6)..(7): Xaa is C or S
KVGKAXXVPTKLSATSVLYYDDMG

SEQ ID NO: 7532 - protein, 17 aa, Artificial Sequence
  Cyclic GFR-binding peptide
ALSATSILYYVGRKPKV

SEQ ID NO: 7533 - protein, 16 aa, Artificial Sequence
  Cyclic GFR-binding peptide
LSAISILYLVGRKPKV

SEQ ID NO: 7534 - protein, 18 aa, Artificial Sequence
  Cyclic GFR-binding peptide
  MOD_RES (5)..(5): Xaa is C or S
TKPTXAPTKLSATSVLYY

SEQ ID NO: 7535 - protein, 13 aa, Artificial Sequence
  Cyclic GFR-binding peptide
VPTELSPISMLYK

SEQ ID NO: 7536 - protein, 21 aa, Artificial Sequence
  Cyclic GFR-binding peptide
  MOD_RES (6)..(7): Xaa is C or S
TVPKPXXAPTQLSATSVLYYD

SEQ ID NO: 7537 - protein, 16 aa, Artificial Sequence
  Cyclic GFR-binding peptide
LNAISILYFVGRTPKV

SEQ ID NO: 7538 - protein, 21 aa, Artificial Sequence
  Cyclic GFR-binding peptide
  MOD_RES (6)..(7): Xaa is C or S
AVPKAXXAPTKLNAISVLYFD

SEQ ID NO: 7539 - protein, 13 aa, Artificial Sequence
  Cyclic GFR-binding peptide
VPTKLNAISVLYF

SEQ ID NO: 7540 - protein, 17 aa, Artificial Sequence
  Cyclic GFR-binding peptide
ELNAISMLYFDEYDKVV

SEQ ID NO: 7541 - protein, 14 aa, Artificial Sequence
  Cyclic GFR-binding peptide
  MOD_RES (1)..(1): Xaa is C or S
XVSQDLSPISILYK

SEQ ID NO: 7542 - protein, 19 aa, Artificial Sequence
  Cyclic GFR-binding peptide
  MOD_RES (5)..(6): Xaa is C or S
VPKAXXAPTKLNAISVLYF

SEQ ID NO: 7543 - protein, 24 aa, Artificial Sequence
  Cyclic GFR-binding peptide
  MOD_RES (6)..(7): Xaa is C or S
YVPKPXXAPTKLSPISVLYKDDSS

SEQ ID NO: 7544 - protein, 15 aa, Artificial Sequence
  Cyclic GFR-binding peptide
SPISVLYKDSSNNVI

SEQ ID NO: 7545 - protein, 25 aa, Artificial Sequence
  Cyclic GFR-binding peptide
  MOD_RES (6)..(7): Xaa is C or S
ASAAPXXVPQALNAISILYFVGRKP

SEQ ID NO: 7546 - protein, 21 aa, Artificial Sequence
  Cyclic GFR-binding peptide
  MOD_RES (5)..(5): Xaa is C or S
RNVQXRPTQVQLSPISVLYKE

SEQ ID NO: 7547 - protein, 16 aa, Artificial Sequence
  Cyclic GFR-binding peptide
  MOD_RES (1)..(1): Xaa is C or S
XRPTQVQLNAISVLYF

SEQ ID NO: 7548 - protein, 21 aa, Artificial Sequence
  Cyclic GFR-binding peptide
  MOD_RES (6)..(7): Xaa is C or S
YVPKPXXAPTKLSPISVLYKD

SEQ ID NO: 7549 - protein, 15 aa, Artificial Sequence
  Cyclic GFR-binding peptide
SPISMLYKDEYDKVV

SEQ ID NO: 7550 - protein, 27 aa, Artificial Sequence
  Cyclic GFR-binding peptide
  MOD_RES (6)..(7): Xaa is C or S
TVPKPXXAPTQLSAISVLYLDDSSNVI

SEQ ID NO: 7551 - protein, 23 aa, Artificial Sequence
  Cyclic GFR-binding peptide
  MOD_RES (6)..(7): Xaa is C or S
TVPKPXXAPTQLSPISVLYKDDS

SEQ ID NO: 7552 - protein, 19 aa, Artificial Sequence
  Cyclic GFR-binding peptide
  MOD_RES (5)..(6): Xaa is C or S
SASPXXVPQDLNAISILYF

SEQ ID NO: 7553 - protein, 19 aa, Artificial Sequence
  Cyclic GFR-binding peptide
  MOD_RES (5)..(6): Xaa is C or S
VGKAXXVPTKLSAISVLYL

SEQ ID NO: 7554 - protein, 19 aa, Artificial Sequence
  Cyclic GFR-binding peptide
  MOD_RES (5)..(6): Xaa is C or S
VPKAXXAPTKLSPISVLYK

SEQ ID NO: 7555 - protein, 17 aa, Artificial Sequence
  Cyclic GFR-binding peptide
KLSAISVLYLDSSNNVI

SEQ ID NO: 7556 - protein, 16 aa, Artificial Sequence
  Cyclic GFR-binding peptide
  MOD_RES (2)..(3): Xaa is C or S
AXXVPTELNAISMLYF

SEQ ID NO: 7557 - protein, 17 aa, Artificial Sequence
  Cyclic GFR-binding peptide
  MOD_RES (3)..(4): Xaa is C or S
APXXVPQALSATSILYY

SEQ ID NO: 7558 - protein, 27 aa, Artificial Sequence
  Cyclic GFR-binding peptide
  MOD_RES (6)..(7): Xaa is C or S
YVPKPXXAPTKLSAISVLYLDDSSNVI

SEQ ID NO: 7559 - protein, 20 aa, Artificial Sequence
  Cyclic GFR-binding peptide
  MOD_RES (6)..(7): Xaa is C or S
AVPKAXXAPTKLSAISVLYL

SEQ ID NO: 7560 - protein, 22 aa, Artificial Sequence
  Cyclic GFR-binding peptide
  MOD_RES (5)..(5): Xaa is C or S
RNVQXRPTQVQLNAISVLYFEI

SEQ ID NO: 7561 - protein, 19 aa, Artificial Sequence
  Cyclic GFR-binding peptide
PTQLSAISVLYLDDSSNVI

SEQ ID NO: 7562 - protein, 19 aa, Artificial Sequence
  Cyclic GFR-binding peptide
PTKLSATSVLYYDDMGVPT

SEQ ID NO: 7563 - protein, 17 aa, Artificial Sequence
  Cyclic GFR-binding peptide
ELSPISMLYKDEYDKVV

SEQ ID NO: 7564 - protein, 17 aa, Artificial Sequence
  Cyclic GFR-binding peptide
  MOD_RES (3)..(4): Xaa is C or S
APXXVPQALSAISILYL

SEQ ID NO: 7565 - protein, 20 aa, Artificial Sequence
  Cyclic GFR-binding peptide
VQLSATSVLYYEIVRKKPIF

SEQ ID NO: 7566 - protein, 16 aa, Artificial Sequence
  Cyclic GFR-binding peptide
  MOD_RES (3)..(3): Xaa is C or S
PTXAPTKLSAISVLYL

SEQ ID NO: 7567 - protein, 15 aa, Artificial Sequence
  Cyclic GFR-binding peptide
SAISVLYLDSSNNVI

SEQ ID NO: 7568 - protein, 25 aa, Artificial Sequence
  Cyclic GFR-binding peptide
  MOD_RES (6)..(7): Xaa is C or S
ASAAPXXVPQALSPISILYKVGRKP

SEQ ID NO: 7569 - protein, 23 aa, Artificial Sequence
  Cyclic GFR-binding peptide
  MOD_RES (6)..(7): Xaa is C or S
ASASPXXVSQDLNAISILYFIGK

SEQ ID NO: 7570 - protein, 16 aa, Artificial Sequence
  Cyclic GFR-binding peptide
LSAISILYLVGRTPKV

SEQ ID NO: 7571 - protein, 24 aa, Artificial Sequence
  Cyclic GFR-binding peptide
  MOD_RES (6)..(7): Xaa is C or S
ASAAPXXVPQALSAISILYLVGRK

SEQ ID NO: 7572 - protein, 24 aa, Artificial Sequence
  Cyclic GFR-binding peptide
  MOD_RES (6)..(7): Xaa is C or S
AVPKAXXAPTKLSPISVLYKDSSN

SEQ ID NO: 7573 - protein, 17 aa, Artificial Sequence
  Cyclic GFR-binding peptide
DLSPISILYKIGKTPKI

SEQ ID NO: 7574 - protein, 17 aa, Artificial Sequence
  Cyclic GFR-binding peptide
  MOD_RES (3)..(4): Xaa is C or S
KPXXAPTKLSATSVLYY

SEQ ID NO: 7575 - protein, 22 aa, Artificial Sequence
  Cyclic GFR-binding peptide
  MOD_RES (6)..(7): Xaa is C or S
ASAAPXXVPQALNAISILYFVG

SEQ ID NO: 7576 - protein, 25 aa, Artificial Sequence
  Cyclic GFR-binding peptide
  MOD_RES (6)..(7): Xaa is C or S
KVGKAXXVPTKLSATSVLYYDDMGV

SEQ ID NO: 7577 - protein, 15 aa, Artificial Sequence
  Cyclic GFR-binding peptide
SATSVLYYDDSSNVI

SEQ ID NO: 7578 - protein, 20 aa, Artificial Sequence
  Cyclic GFR-binding peptide
  MOD_RES (6)..(7): Xaa is C or S
KVGKAXXVPTKLSAISVLYL

SEQ ID NO: 7579 - protein, 23 aa, Artificial Sequence
  Cyclic GFR-binding peptide
  MOD_RES (7)..(7): Xaa is C or S
HVTKPTXAPTKLSAISVLYLDDS

SEQ ID NO: 7580 - protein, 16 aa, Artificial Sequence
  Cyclic GFR-binding peptide
  MOD_RES (2)..(3): Xaa is C or S
AXXAPTKLSPISVLYK

SEQ ID NO: 7581 - protein, 19 aa, Artificial Sequence
  Cyclic GFR-binding peptide
QLSAISVLYLEIVRKKPIF

SEQ ID NO: 7582 - protein, 24 aa, Artificial Sequence
  Cyclic GFR-binding peptide
  MOD_RES (6)..(7): Xaa is C or S
KIPKAXXVPTELNAISMLYFDENE

SEQ ID NO: 7583 - protein, 19 aa, Artificial Sequence
  Cyclic GFR-binding peptide
PQALNAISILYFVGRKPKV

SEQ ID NO: 7584 - protein, 25 aa, Artificial Sequence
  Cyclic GFR-binding peptide
  MOD_RES (6)..(7): Xaa is C or S
AVPKAXXAPTKLSPISVLYKDSSNN

SEQ ID NO: 7585 - protein, 23 aa, Artificial Sequence
  Cyclic GFR-binding peptide
  MOD_RES (6)..(7): Xaa is C or S
ASASPXXVPQDLSPISILYKVGR

SEQ ID NO: 7586 - protein, 13 aa, Artificial Sequence
  Cyclic GFR-binding peptide
VPTKLSAISVLYL

SEQ ID NO: 7587 - protein, 16 aa, Artificial Sequence
  Cyclic GFR-binding peptide
  MOD_RES (2)..(3): Xaa is C or S
PXXAPTKLSAISVLYL

SEQ ID NO: 7588 - protein, 15 aa, Artificial Sequence
  Cyclic GFR-binding peptide
  MOD_RES (1)..(2): Xaa is C or S
XXVPQDLSATSILYY

SEQ ID NO: 7589 - protein, 15 aa, Artificial Sequence
  Cyclic GFR-binding peptide
NAISMLYFDEYDKVV

SEQ ID NO: 7590 - protein, 20 aa, Artificial Sequence
  Cyclic GFR-binding peptide
  MOD_RES (6)..(7): Xaa is C or S
KVGKAXXVPTKLSATSVLYY

SEQ ID NO: 7591 - protein, 14 aa, Artificial Sequence
  Cyclic GFR-binding peptide
PTQVQLSAISVLYL

SEQ ID NO: 7592 - protein, 18 aa, Artificial Sequence
  Cyclic GFR-binding peptide
TKLSAISVLYLDDMGVPT

SEQ ID NO: 7593 - protein, 16 aa, Artificial Sequence
  Cyclic GFR-binding peptide
LSPISVLYKDDSSNVI

SEQ ID NO: 7594 - protein, 16 aa, Artificial Sequence
  Cyclic GFR-binding peptide
LSPISILYKVGRKPKV

SEQ ID NO: 7595 - protein, 13 aa, Artificial Sequence
  Cyclic GFR-binding peptide
VSQDLNAISILYF

SEQ ID NO: 7596 - protein, 16 aa, Artificial Sequence
  Cyclic GFR-binding peptide
  MOD_RES (2)..(3): Xaa is C or S
PXXVPQDLSPISILYK

SEQ ID NO: 7597 - protein, 15 aa, Artificial Sequence
  Cyclic GFR-binding peptide
  MOD_RES (1)..(2): Xaa is C or S
XXVSQDLSPISILYK

SEQ ID NO: 7598 - protein, 27 aa, Artificial Sequence
  Cyclic GFR-binding peptide
  MOD_RES (6)..(7): Xaa is C or S
TVPKPXXAPTQLSPISVLYKDDSSNVI

SEQ ID NO: 7599 - protein, 26 aa, Artificial Sequence
  Cyclic GFR-binding peptide
  MOD_RES (6)..(7): Xaa is C or S
KIPKAXXVPTELSPISMLYKDENEKV

SEQ ID NO: 7600 - protein, 22 aa, Artificial Sequence
  Cyclic GFR-binding peptide
  MOD_RES (6)..(7): Xaa is C or S
KVGKAXXVPTKLSAISVLYLDD

SEQ ID NO: 7601 - protein, 17 aa, Artificial Sequence
  Cyclic GFR-binding peptide
  MOD_RES (4)..(4): Xaa is C or S
KPTXAPTKLSPISVLYK

SEQ ID NO: 7602 - protein, 19 aa, Artificial Sequence
  Cyclic GFR-binding peptide
PTKLSAISVLYLDDSSNVI

SEQ ID NO: 7603 - protein, 14 aa, Artificial Sequence
  Cyclic GFR-binding peptide
  MOD_RES (1)..(1): Xaa is C or S
XVSQDLSATSILYY

SEQ ID NO: 7604 - protein, 13 aa, Artificial Sequence
  Cyclic GFR-binding peptide
VPTELSATSMLYY

SEQ ID NO: 7605 - protein, 16 aa, Artificial Sequence
  Cyclic GFR-binding peptide
LSPISILYKVGRTPKV

SEQ ID NO: 7606 - protein, 15 aa, Artificial Sequence
  Cyclic GFR-binding peptide
  MOD_RES (1)..(2): Xaa is C or S
XXVPQALSPISILYK

SEQ ID NO: 7607 - protein, 19 aa, Artificial Sequence
  Cyclic GFR-binding peptide
PQALSATSILYYVGRKPKV

SEQ ID NO: 7608 - protein, 24 aa, Artificial Sequence
  Cyclic GFR-binding peptide
  MOD_RES (6)..(7): Xaa is C or S
ASASPXXVPQDLNAISILYFVGRT

SEQ ID NO: 7609 - protein, 19 aa, Artificial Sequence
  Cyclic GFR-binding peptide
QLNAISVLYFEIVRKKPIF

SEQ ID NO: 7610 - protein, 17 aa, Artificial Sequence
  Cyclic GFR-binding peptide
QLSATSVLYYDDSSNVI

SEQ ID NO: 7611 - protein, 16 aa, Artificial Sequence
  Cyclic GFR-binding peptide
  MOD_RES (2)..(3): Xaa is C or S
AXXVPTELSATSMLYY

SEQ ID NO: 7612 - protein, 21 aa, Artificial Sequence
  Cyclic GFR-binding peptide
  MOD_RES (6)..(7): Xaa is C or S
KVGKAXXVPTKLNAISVLYFD

SEQ ID NO: 7613 - protein, 19 aa, Artificial Sequence
  Cyclic GFR-binding peptide
  MOD_RES (5)..(6): Xaa is C or S
SASPXXVSQDLNAISILYF

SEQ ID NO: 7614 - protein, 17 aa, Artificial Sequence
  Cyclic GFR-binding peptide
  MOD_RES (4)..(4): Xaa is C or S
KPTXAPTKLSATSVLYY

SEQ ID NO: 7615 - protein, 21 aa, Artificial Sequence
  Cyclic GFR-binding peptide
  MOD_RES (6)..(7): Xaa is C or S
ASASPXXVSQDLSATSILYYI

SEQ ID NO: 7616 - protein, 17 aa, Artificial Sequence
  Cyclic GFR-binding peptide
KLSATSVLYYDDSSNVI

SEQ ID NO: 7617 - protein, 18 aa, Artificial Sequence
  Cyclic GFR-binding peptide
QALNAISILYFVGRKPKV

SEQ ID NO: 7618 - protein, 16 aa, Artificial Sequence
  Cyclic GFR-binding peptide
LNAISILYFIGKTPKI

SEQ ID NO: 7619 - protein, 18 aa, Artificial Sequence
  Cyclic GFR-binding peptide
  MOD_RES (4)..(5): Xaa is C or S
AAPXXVPQALSPISILYK

SEQ ID NO: 7620 - protein, 13 aa, Artificial Sequence
  Cyclic GFR-binding peptide
VPTKLSATSVLYY

SEQ ID NO: 7621 - protein, 20 aa, Artificial Sequence
  Cyclic GFR-binding peptide
  MOD_RES (6)..(7): Xaa is C or S
YVPKPXXAPTKLSAISVLYL

SEQ ID NO: 7622 - protein, 18 aa, Artificial Sequence
  Cyclic GFR-binding peptide
QALSAISILYLVGRKPKV

SEQ ID NO: 7623 - protein, 25 aa, Artificial Sequence
  Cyclic GFR-binding peptide
  MOD_RES (6)..(7): Xaa is C or S
AVPKAXXAPTKLNAISVLYFDSSNN

SEQ ID NO: 7624 - protein, 25 aa, Artificial Sequence
  Cyclic GFR-binding peptide
  MOD_RES (7)..(7): Xaa is C or S
HVTKPTXAPTKLSPISVLYKDDSSN

SEQ ID NO: 7625 - protein, 20 aa, Artificial Sequence
  Cyclic GFR-binding peptide
  MOD_RES (6)..(7): Xaa is C or S
KVGKAXXVPTKLNAISVLYF

SEQ ID NO: 7626 - protein, 18 aa, Artificial Sequence
  Cyclic GFR-binding peptide
  MOD_RES (4)..(5): Xaa is C or S
PKPXXAPTQLSPISVLYK

SEQ ID NO: 7627 - protein, 18 aa, Artificial Sequence
  Cyclic GFR-binding peptide
TELSATSMLYYDEYDKVV

SEQ ID NO: 7628 - protein, 26 aa, Artificial Sequence
  Cyclic GFR-binding peptide
  MOD_RES (6)..(7): Xaa is C or S
ASASPXXVSQDLSPISILYKIGKTPK

SEQ ID NO: 7629 - protein, 13 aa, Artificial Sequence
  Cyclic GFR-binding peptide
APTQLSPISVLYK

SEQ ID NO: 7630 - protein, 27 aa, Artificial Sequence
  Cyclic GFR-binding peptide
  MOD_RES (6)..(7): Xaa is C or S
ASASPXXVPQDLSPISILYKVGRTPKV

SEQ ID NO: 7631 - protein, 25 aa, Artificial Sequence
  Cyclic GFR-binding peptide
  MOD_RES (6)..(7): Xaa is C or S
ASASPXXVPQDLSAISILYLVGRTP

SEQ ID NO: 7632 - protein, 23 aa, Artificial Sequence
  Cyclic GFR-binding peptide
  MOD_RES (6)..(7): Xaa is C or S
YVPKPXXAPTKLSATSVLYYDDS

SEQ ID NO: 7633 - protein, 24 aa, Artificial Sequence
  Cyclic GFR-binding peptide
  MOD_RES (6)..(7): Xaa is C or S
AVPKAXXAPTKLNAISVLYFDSSN

SEQ ID NO: 7634 - protein, 14 aa, Artificial Sequence
  Cyclic GFR-binding peptide
  MOD_RES (1)..(1): Xaa is C or S
XVPQALSATSILYY

SEQ ID NO: 7635 - protein, 25 aa, Artificial Sequence
  Cyclic GFR-binding peptide
  MOD_RES (6)..(7): Xaa is C or S
ASAAPXXVPQALSAISILYLVGRKP

SEQ ID NO: 7636 - protein, 26 aa, Artificial Sequence
  Cyclic GFR-binding peptide
  MOD_RES (6)..(7): Xaa is C or S
KIPKAXXVPTELSATSMLYYDENEKV

SEQ ID NO: 7637 - protein, 22 aa, Artificial Sequence
  Cyclic GFR-binding peptide
  MOD_RES (6)..(7): Xaa is C or S
KIPKAXXVPTELNAISMLYFDE

SEQ ID NO: 7638 - protein, 20 aa, Artificial Sequence
  Cyclic GFR-binding peptide
  MOD_RES (6)..(7): Xaa is C or S
ASAAPXXVPQALSATSILYY

SEQ ID NO: 7639 - protein, 25 aa, Artificial Sequence
  Cyclic GFR-binding peptide
  MOD_RES (7)..(7): Xaa is C or S
HVTKPTXAPTKLSATSVLYYDDSSN

SEQ ID NO: 7640 - protein, 18 aa, Artificial Sequence
  Cyclic GFR-binding peptide
  MOD_RES (4)..(5): Xaa is C or S
PKPXXAPTKLSATSVLYY

SEQ ID NO: 7641 - protein, 14 aa, Artificial Sequence
  Cyclic GFR-binding peptide
  MOD_RES (1)..(1): Xaa is C or S
XVPQDLSPISILYK

SEQ ID NO: 7642 - protein, 23 aa, Artificial Sequence
  Cyclic GFR-binding peptide
  MOD_RES (6)..(7): Xaa is C or S
TVPKPXXAPTQLSATSVLYYDDS

SEQ ID NO: 7643 - protein, 27 aa, Artificial Sequence
  Cyclic GFR-binding peptide
  MOD_RES (6)..(7): Xaa is C or S
ASAAPXXVPQALSATSILYYVGRKPKV

SEQ ID NO: 7644 - protein, 15 aa, Artificial Sequence
  Cyclic GFR-binding peptide
  MOD_RES (1)..(2): Xaa is C or S
XXVPQDLSPISILYK

SEQ ID NO: 7645 - protein, 23 aa, Artificial Sequence
  Cyclic GFR-binding peptide
  MOD_RES (6)..(7): Xaa is C or S
YVPKPXXAPTKLSPISVLYKDDS

SEQ ID NO: 7646 - protein, 17 aa, Artificial Sequence
  Cyclic GFR-binding peptide
  MOD_RES (2)..(2): Xaa is C or S
QXRPTQVQLNAISVLYF

SEQ ID NO: 7647 - protein, 13 aa, Artificial Sequence
  Cyclic GFR-binding peptide
VPTELNAISMLYF

SEQ ID NO: 7648 - protein, 20 aa, Artificial Sequence
  Cyclic GFR-binding peptide
  MOD_RES (6)..(7): Xaa is C or S
ASAAPXXVPQALSPISILYK

SEQ ID NO: 7649 - protein, 23 aa, Artificial Sequence
  Cyclic GFR-binding peptide
  MOD_RES (6)..(7): Xaa is C or S
KIPKAXXVPTELSPISMLYKDEN

SEQ ID NO: 7650 - protein, 18 aa, Artificial Sequence
  Cyclic GFR-binding peptide
  MOD_RES (4)..(5): Xaa is C or S
PKPXXAPTQLSATSVLYY

SEQ ID NO: 7651 - protein, 17 aa, Artificial Sequence
  Cyclic GFR-binding peptide
  MOD_RES (3)..(4): Xaa is C or S
KPXXAPTQLSATSVLYY

SEQ ID NO: 7652 - protein, 15 aa, Artificial Sequence
  Cyclic GFR-binding peptide
SATSILYYVGRTPKV

SEQ ID NO: 7653 - protein, 25 aa, Artificial Sequence
  Cyclic GFR-binding peptide
  MOD_RES (5)..(5): Xaa is C or S
RNVQXRPTQVQLSAISVLYLEIVRK

SEQ ID NO: 7654 - protein, 22 aa, Artificial Sequence
  Cyclic GFR-binding peptide
  MOD_RES (5)..(5): Xaa is C or S
RNVQXRPTQVQLSATSVLYYEI

SEQ ID NO: 7655 - protein, 17 aa, Artificial Sequence
  Cyclic GFR-binding peptide
ELSATSMLYYDENEKVV

SEQ ID NO: 7656 - protein, 16 aa, Artificial Sequence
  Cyclic GFR-binding peptide
  MOD_RES (2)..(3): Xaa is C or S
AXXVPTKLSATSVLYY

SEQ ID NO: 7657 - protein, 26 aa, Artificial Sequence
  Cyclic GFR-binding peptide
  MOD_RES (6)..(7): Xaa is C or S
ASASPXXVPQDLSPISILYKVGRTPK

SEQ ID NO: 7658 - protein, 17 aa, Artificial Sequence
  Cyclic GFR-binding peptide
  MOD_RES (3)..(4): Xaa is C or S
KPXXAPTKLSPISVLYK

SEQ ID NO: 7659 - protein, 21 aa, Artificial Sequence
  Cyclic GFR-binding peptide
  MOD_RES (6)..(7): Xaa is C or S
KVGKAXXVPTKLSAISVLYLD

SEQ ID NO: 7660 - protein, 17 aa, Artificial Sequence
  Cyclic GFR-binding peptide
  MOD_RES (3)..(4): Xaa is C or S
KPXXAPTQLSPISVLYK

SEQ ID NO: 7661 - protein, 16 aa, Artificial Sequence
  Cyclic GFR-binding peptide
LSATSVLYYDDMGVPT

SEQ ID NO: 7662 - protein, 16 aa, Artificial Sequence
  Cyclic GFR-binding peptide
LNAISILYFVGRKPKV

SEQ ID NO: 7663 - protein, 14 aa, Artificial Sequence
  Cyclic GFR-binding peptide
  MOD_RES (1)..(1): Xaa is C or S
XVPQDLSATSILYY

SEQ ID NO: 7664 - protein, 14 aa, Artificial Sequence
  Cyclic GFR-binding peptide
  MOD_RES (1)..(1): Xaa is C or S
XVPQALSPISILYK

SEQ ID NO: 7665 - protein, 18 aa, Artificial Sequence
  Cyclic GFR-binding peptide
  MOD_RES (3)..(3): Xaa is C or S
VQXRPTQVQLSPISVLYK

SEQ ID NO: 7666 - protein, 29 aa, Artificial Sequence
  Cyclic GFR-binding peptide
  MOD_RES (5)..(5): Xaa is C or S
RNVQXRPTQVQLSATSVLYYEIVRKKPIF

SEQ ID NO: 7667 - protein, 21 aa, Artificial Sequence
  Cyclic GFR-binding peptide
  MOD_RES (5)..(5): Xaa is C or S
RNVQXRPTQVQLNAISVLYFE

SEQ ID NO: 7668 - protein, 18 aa, Artificial Sequence
  Cyclic GFR-binding peptide
QALSPISILYKVGRKPKV

SEQ ID NO: 7669 - protein, 20 aa, Artificial Sequence
  Cyclic GFR-binding peptide
  MOD_RES (5)..(5): Xaa is C or S
RNVQXRPTQVQLSPISVLYK

SEQ ID NO: 7670 - protein, 18 aa, Artificial Sequence
  Cyclic GFR-binding peptide
  MOD_RES (5)..(5): Xaa is C or S
TKPTXAPTKLSPISVLYK

SEQ ID NO: 7671 - protein, 23 aa, Artificial Sequence
  Cyclic GFR-binding peptide
  MOD_RES (6)..(7): Xaa is C or S
ASAAPXXVPQALNAISILYFVGR

SEQ ID NO: 7672 - protein, 18 aa, Artificial Sequence
  Cyclic GFR-binding peptide
  MOD_RES (4)..(5): Xaa is C or S
PKPXXAPTKLSPISVLYK

SEQ ID NO: 7673 - protein, 26 aa, Artificial Sequence
  Cyclic GFR-binding peptide
  MOD_RES (6)..(7): Xaa is C or S
AVPKAXXAPTKLNAISVLYFDSSNNV

SEQ ID NO: 7674 - protein, 21 aa, Artificial Sequence
  Cyclic GFR-binding peptide
  MOD_RES (7)..(7): Xaa is C or S
HVTKPTXAPTKLSAISVLYLD

SEQ ID NO: 7675 - protein, 15 aa, Artificial Sequence
  Cyclic GFR-binding peptide
NAISMLYFDENEKVV

SEQ ID NO: 7676 - protein, 13 aa, Artificial Sequence
  Cyclic GFR-binding peptide
APTKLSPISVLYK

SEQ ID NO: 7677 - protein, 18 aa, Artificial Sequence
  Cyclic GFR-binding peptide
TKLNAISVLYFDDMGVPT

SEQ ID NO: 7678 - protein, 18 aa, Artificial Sequence
  Cyclic GFR-binding peptide
LSAISVLYLEIVRKKPIF

SEQ ID NO: 7679 - protein, 26 aa, Artificial Sequence
  Cyclic GFR-binding peptide
  MOD_RES (6)..(7): Xaa is C or S
KVGKAXXVPTKLSATSVLYYDDMGVP

SEQ ID NO: 7680 - protein, 13 aa, Artificial Sequence
  Cyclic GFR-binding peptide
APTQLSATSVLYY

SEQ ID NO: 7681 - protein, 23 aa, Artificial Sequence
  Cyclic GFR-binding peptide
  MOD_RES (6)..(7): Xaa is C or S
KVGKAXXVPTKLNAISVLYFDDM

SEQ ID NO: 7682 - protein, 27 aa, Artificial Sequence
  Cyclic GFR-binding peptide
  MOD_RES (7)..(7): Xaa is C or S
HVTKPTXAPTKLSATSVLYYDDSSNVI

SEQ ID NO: 7683 - protein, 17 aa, Artificial Sequence
  Cyclic GFR-binding peptide
KLSPISVLYKDSSNNVI

SEQ ID NO: 7684 - protein, 24 aa, Artificial Sequence
  Cyclic GFR-binding peptide
  MOD_RES (6)..(7): Xaa is C or S
ASAAPXXVPQALNAISILYFVGRK

SEQ ID NO: 7685 - protein, 13 aa, Artificial Sequence
  Cyclic GFR-binding peptide
IFLVSIPSLKTPA

SEQ ID NO: 7686 - protein, 20 aa, Artificial Sequence
  Cyclic GFR-binding peptide
  MOD_RES (14)..(14): Xaa is C or S
IFLVSIPSLKTPAXTPKTVH

SEQ ID NO: 7687 - protein, 27 aa, Artificial Sequence
  Cyclic GFR-binding peptide
  MOD_RES (21)..(22): Xaa is C or S
VVKDYEDYYVMPLPELETPVXXAKPIS

SEQ ID NO: 7688 - protein, 23 aa, Artificial Sequence
  Cyclic GFR-binding peptide
  MOD_RES (17)..(18): Xaa is C or S
SDDYYVVPLPELKTPAXXPKPVY

SEQ ID NO: 7689 - protein, 24 aa, Artificial Sequence
  Cyclic GFR-binding peptide
  MOD_RES (18)..(19): Xaa is C or S
NASDLYLISIASLRTPVXXTPPTS

SEQ ID NO: 7690 - protein, 26 aa, Artificial Sequence
  Cyclic GFR-binding peptide
  MOD_RES (20)..(21): Xaa is C or S
VNSSDDIFLVSIPSLKTPAXXPKPVY

SEQ ID NO: 7691 - protein, 19 aa, Artificial Sequence
  Cyclic GFR-binding peptide
  MOD_RES (14)..(15): Xaa is C or S
YYLVTLPELKTPAXXPKPV

SEQ ID NO: 7692 - protein, 15 aa, Artificial Sequence
  Cyclic GFR-binding peptide
VKPTRGVIFLISIPS

SEQ ID NO: 7693 - protein, 24 aa, Artificial Sequence
  Cyclic GFR-binding peptide
  MOD_RES (18)..(19): Xaa is C or S
SSDDIFLVSIPSLKTPAXXPKPVY

SEQ ID NO: 7694 - protein, 26 aa, Artificial Sequence
  Cyclic GFR-binding peptide
  MOD_RES (20)..(20): Xaa is C or S
VNSSDDIFLVSIPSLKTPAXTPKTVH

SEQ ID NO: 7695 - protein, 20 aa, Artificial Sequence
  Cyclic GFR-binding peptide
  MOD_RES (14)..(15): Xaa is C or S
IFLMSIPSLETPVXXAKPIS

SEQ ID NO: 7696 - protein, 19 aa, Artificial Sequence
  Cyclic GFR-binding peptide
  MOD_RES (14)..(15): Xaa is C or S
YYVVPLPELKTPAXXPKPV

SEQ ID NO: 7697 - protein, 26 aa, Artificial Sequence
  Cyclic GFR-binding peptide
  MOD_RES (20)..(21): Xaa is C or S
VNSSDDYYLVTLPELQTPAXXPKPVT

SEQ ID NO: 7698 - protein, 23 aa, Artificial Sequence
  Cyclic GFR-binding peptide
  MOD_RES (17)..(18): Xaa is C or S
KGIIFLISIPSLDQSVXXPSASA

SEQ ID NO: 7699 - protein, 16 aa, Artificial Sequence
  Cyclic GFR-binding peptide
  MOD_RES (14)..(15): Xaa is C or S
YYVIPLPELDQPVXXP

SEQ ID NO: 7700 - protein, 20 aa, Artificial Sequence
  Cyclic GFR-binding peptide
  MOD_RES (14)..(15): Xaa is C or S
YYVIPLPELDQSVXXPSASA

SEQ ID NO: 7701 - protein, 20 aa, Artificial Sequence
  Cyclic GFR-binding peptide
  MOD_RES (14)..(15): Xaa is C or S
LYLISIASLRTPVXXTPPTS

SEQ ID NO: 7702 - protein, 17 aa, Artificial Sequence
  Cyclic GFR-binding peptide
VKPTRGVYYVIPLPELD

SEQ ID NO: 7703 - protein, 16 aa, Artificial Sequence
  Cyclic GFR-binding peptide
IKPTKGIIFLISIPSL

SEQ ID NO: 7704 - protein, 18 aa, Artificial Sequence
  Cyclic GFR-binding peptide
VVKENEDIFLMSIPSLET

SEQ ID NO: 7705 - protein, 15 aa, Artificial Sequence
  Cyclic GFR-binding peptide
VVNNASDFYLISIAN

SEQ ID NO: 7706 - protein, 19 aa, Artificial Sequence
  Cyclic GFR-binding peptide
IVNSSDDYYVVPLPELKTP

SEQ ID NO: 7707 - protein, 14 aa, Artificial Sequence
  Cyclic GFR-binding peptide
  MOD_RES (14)..(14): Xaa is C or S
YYVIPLPELRTPVX

SEQ ID NO: 7708 - protein, 19 aa, Artificial Sequence
  Cyclic GFR-binding peptide
IVNSSDDYYVVPLPELQTP

SEQ ID NO: 7709 - protein, 15 aa, Artificial Sequence
  Cyclic GFR-binding peptide
VVNNASDLYLISIAS

SEQ ID NO: 7710 - protein, 20 aa, Artificial Sequence
  Cyclic GFR-binding peptide
  MOD_RES (14)..(15): Xaa is C or S
YYLMTLPELETPVXXAKPIK

SEQ ID NO: 7711 - protein, 15 aa, Artificial Sequence
  Cyclic GFR-binding peptide
VVKDYEDYYLMTLPE

SEQ ID NO: 7712 - protein, 15 aa, Artificial Sequence
  Cyclic GFR-binding peptide
  MOD_RES (14)..(15): Xaa is C or S
YYVVPLPELKTPAXX

SEQ ID NO: 7713 - protein, 15 aa, Artificial Sequence
  Cyclic GFR-binding peptide
  MOD_RES (14)..(14): Xaa is C or S
IFLVSIPSLKTPAXT

SEQ ID NO: 7714 - protein, 24 aa, Artificial Sequence
  Cyclic GFR-binding peptide
  MOD_RES (18)..(19): Xaa is C or S
KRGVIFLISIPSLAQPVXXPAASA

SEQ ID NO: 7715 - protein, 13 aa, Artificial Sequence
  Cyclic GFR-binding peptide
YYVVPLPELKTPA

SEQ ID NO: 7716 - protein, 20 aa, Artificial Sequence
  Cyclic GFR-binding peptide
  MOD_RES (14)..(15): Xaa is C or S
YYVMPLPELETPVXXAKPIS

SEQ ID NO: 7717 - protein, 27 aa, Artificial Sequence
  Cyclic GFR-binding peptide
  MOD_RES (21)..(22): Xaa is C or S
IVNSSDDIFLVSIPSLQTPAXXPKPVT

SEQ ID NO: 7718 - protein, 14 aa, Artificial Sequence
  Cyclic GFR-binding peptide
  MOD_RES (14)..(14): Xaa is C or S
YYLITLPELRTPVX

SEQ ID NO: 7719 - protein, 18 aa, Artificial Sequence
  Cyclic GFR-binding peptide
VVNNASDFYLISIANLRT

SEQ ID NO: 7720 - protein, 14 aa, Artificial Sequence
  Cyclic GFR-binding peptide
  MOD_RES (14)..(14): Xaa is C or S
YYLVTLPELKTPAX

SEQ ID NO: 7721 - protein, 19 aa, Artificial Sequence
  Cyclic GFR-binding peptide
VKPKRGVYYLITLPELAQP

SEQ ID NO: 7722 - protein, 19 aa, Artificial Sequence
  Cyclic GFR-binding peptide
  MOD_RES (14)..(14): Xaa is C or S
YYLVTLPELKTPAXTPKTV

SEQ ID NO: 7723 - protein, 15 aa, Artificial Sequence
  Cyclic GFR-binding peptide
  MOD_RES (14)..(14): Xaa is C or S
YYVVPLPELKTPAXT

SEQ ID NO: 7724 - protein, 24 aa, Artificial Sequence
  Cyclic GFR-binding peptide
  MOD_RES (18)..(18): Xaa is C or S
SSDDYYLVTLPELKTPAXTPKTVH

SEQ ID NO: 7725 - protein, 22 aa, Artificial Sequence
  Cyclic GFR-binding peptide
  MOD_RES (16)..(17): Xaa is C or S
GVYYLITLPELAQPVXXPAASA

SEQ ID NO: 7726 - protein, 20 aa, Artificial Sequence
  Cyclic GFR-binding peptide
  MOD_RES (14)..(15): Xaa is C or S
IFLISIPSLDQSVXXPSASA

SEQ ID NO: 7727 - protein, 18 aa, Artificial Sequence
  Cyclic GFR-binding peptide
VKPKRGVYYLITLPELAQ

SEQ ID NO: 7728 - protein, 22 aa, Artificial Sequence
  Cyclic GFR-binding peptide
  MOD_RES (16)..(17): Xaa is C or S
EDYYVMPLPELETPVXXAKPIK

SEQ ID NO: 7729 - protein, 18 aa, Artificial Sequence
  Cyclic GFR-binding peptide
  MOD_RES (14)..(15): Xaa is C or S
IFLISIPSLDQPVXXPSA

SEQ ID NO: 7730 - protein, 20 aa, Artificial Sequence
  Cyclic GFR-binding peptide
  MOD_RES (14)..(14): Xaa is C or S
YYVVPLPELKTPAXTPKTVH

SEQ ID NO: 7731 - protein, 16 aa, Artificial Sequence
  Cyclic GFR-binding peptide
VKPKRGVIFLISIPSL

SEQ ID NO: 7732 - protein, 26 aa, Artificial Sequence
  Cyclic GFR-binding peptide
  MOD_RES (20)..(21): Xaa is C or S
VKENEDYYVMPLPELETPVXXAKPIK

SEQ ID NO: 7733 - protein, 23 aa, Artificial Sequence
  Cyclic GFR-binding peptide
  MOD_RES (17)..(18): Xaa is C or S
RGVIFLISIPSLDQPVXXPSASA

SEQ ID NO: 7734 - protein, 16 aa, Artificial Sequence
  Cyclic GFR-binding peptide
  MOD_RES (14)..(15): Xaa is C or S
IFLISIPSLDQPVXXP

SEQ ID NO: 7735 - protein, 22 aa, Artificial Sequence
  Cyclic GFR-binding peptide
  MOD_RES (16)..(17): Xaa is C or S
SDYYVIPLPELRTPVXXTPPTS

SEQ ID NO: 7736 - protein, 17 aa, Artificial Sequence
  Cyclic GFR-binding peptide
  MOD_RES (14)..(15): Xaa is C or S
YYLMTLPELETPVXXAK

SEQ ID NO: 7737 - protein, 19 aa, Artificial Sequence
  Cyclic GFR-binding peptide
IKPTKGIIFLISIPSLDQS

SEQ ID NO: 7738 - protein, 22 aa, Artificial Sequence
  Cyclic GFR-binding peptide
  MOD_RES (16)..(16): Xaa is C or S
DDYYVVPLPELKTPAXTPKTVH

SEQ ID NO: 7739 - protein, 25 aa, Artificial Sequence
  Cyclic GFR-binding peptide
  MOD_RES (19)..(20): Xaa is C or S
KENEDYYLMTLPELETPVXXAKPIK

SEQ ID NO: 7740 - protein, 18 aa, Artificial Sequence
  Cyclic GFR-binding peptide
  MOD_RES (14)..(15): Xaa is C or S
IFLISIPSLAQPVXXPAA

SEQ ID NO: 7741 - protein, 16 aa, Artificial Sequence
  Cyclic GFR-binding peptide
VVNNASDLYLISIASL

SEQ ID NO: 7742 - protein, 21 aa, Artificial Sequence
  Cyclic GFR-binding peptide
  MOD_RES (15)..(16): Xaa is C or S
DYYVVPLPELKTPAXXPKPVY

SEQ ID NO: 7743 - protein, 16 aa, Artificial Sequence
  Cyclic GFR-binding peptide
VVKDYEDYYLMTLPEL

SEQ ID NO: 7744 - protein, 25 aa, Artificial Sequence
  Cyclic GFR-binding peptide
  MOD_RES (19)..(20): Xaa is C or S
NNASDFYLISIANLRTPVXXTPPTS

SEQ ID NO: 7745 - protein, 25 aa, Artificial Sequence
  Cyclic GFR-binding peptide
  MOD_RES (19)..(20): Xaa is C or S
KENEDYYVMPLPELETPVXXAKPIK

SEQ ID NO: 7746 - protein, 17 aa, Artificial Sequence
  Cyclic GFR-binding peptide
IVNSSDDYYVVPLPELQ

SEQ ID NO: 7747 - protein, 17 aa, Artificial Sequence
  Cyclic GFR-binding peptide
IKPTKGIYYVIPLPELD

SEQ ID NO: 7748 - protein, 27 aa, Artificial Sequence
  Cyclic GFR-binding peptide
  MOD_RES (21)..(22): Xaa is C or S
VKPKRGVIFLISIPSLAQPVXXPAASA

SEQ ID NO: 7749 - protein, 17 aa, Artificial Sequence
  Cyclic GFR-binding peptide
IVNSSDDYYVVPLPELK

SEQ ID NO: 7750 - protein, 23 aa, Artificial Sequence
  Cyclic GFR-binding peptide
  MOD_RES (17)..(18): Xaa is C or S
ASDYYVIPLPELRTPVXXTPPTS

SEQ ID NO: 7751 - protein, 15 aa, Artificial Sequence
  Cyclic GFR-binding peptide
IKPTKGIYYVIPLPE

SEQ ID NO: 7752 - protein, 27 aa, Artificial Sequence
  Cyclic GFR-binding peptide
  MOD_RES (21)..(22): Xaa is C or S
VVNNASDYYVIPLPELRTPVXXTPPTS

SEQ ID NO: 7753 - protein, 21 aa, Artificial Sequence
  Cyclic GFR-binding peptide
  MOD_RES (15)..(16): Xaa is C or S
DYYVVPLPELQTPAXXPKPVT

SEQ ID NO: 7754 - protein, 15 aa, Artificial Sequence
  Cyclic GFR-binding peptide
  MOD_RES (14)..(15): Xaa is C or S
YYVIPLPELRTPVXX

SEQ ID NO: 7755 - protein, 24 aa, Artificial Sequence
  Cyclic GFR-binding peptide
  MOD_RES (18)..(19): Xaa is C or S
NASDYYVIPLPELRTPVXXTPPTS

SEQ ID NO: 7756 - protein, 19 aa, Artificial Sequence
  Cyclic GFR-binding peptide
VVKDYEDYYLMTLPELETP

SEQ ID NO: 7757 - protein, 24 aa, Artificial Sequence
  Cyclic GFR-binding peptide
  MOD_RES (18)..(19): Xaa is C or S
TRGVYYVIPLPELDQPVXXPSASA

SEQ ID NO: 7758 - protein, 25 aa, Artificial Sequence
  Cyclic GFR-binding peptide
  MOD_RES (19)..(20): Xaa is C or S
PTRGVIFLISIPSLDQPVXXPSASA

SEQ ID NO: 7759 - protein, 27 aa, Artificial Sequence
  Cyclic GFR-binding peptide
  MOD_RES (21)..(22): Xaa is C or S
VVKENEDYYLMTLPELETPVXXAKPIK

SEQ ID NO: 7760 - protein, 16 aa, Artificial Sequence
  Cyclic GFR-binding peptide
  MOD_RES (14)..(15): Xaa is C or S
YYVIPLPELDQSVXXP

SEQ ID NO: 7761 - protein, 20 aa, Artificial Sequence
  Cyclic GFR-binding peptide
  MOD_RES (14)..(15): Xaa is C or S
YYLMTLPELETPVXXAKPIS

SEQ ID NO: 7762 - protein, 22 aa, Artificial Sequence
  Cyclic GFR-binding peptide
  MOD_RES (16)..(17): Xaa is C or S
EDYYLMTLPELETPVXXAKPIK

SEQ ID NO: 7763 - protein, 25 aa, Artificial Sequence
  Cyclic GFR-binding peptide
  MOD_RES (19)..(20): Xaa is C or S
NSSDDYYLVTLPELQTPAXXPKPVT

SEQ ID NO: 7764 - protein, 18 aa, Artificial Sequence
  Cyclic GFR-binding peptide
VKPTRGVYYVIPLPELDQ

SEQ ID NO: 7765 - protein, 27 aa, Artificial Sequence
  Cyclic GFR-binding peptide
  MOD_RES (21)..(22): Xaa is C or S
IVNSSDDIFLVSIPSLKTPAXXPKPVY

SEQ ID NO: 7766 - protein, 14 aa, Artificial Sequence
  Cyclic GFR-binding peptide
  MOD_RES (14)..(14): Xaa is C or S
IFLVSIPSLKTPAX

SEQ ID NO: 7767 - protein, 27 aa, Artificial Sequence
  Cyclic GFR-binding peptide
  MOD_RES (21)..(21): Xaa is C or S
IVNSSDDYYVVPLPELKTPAXTPKTVH

SEQ ID NO: 7768 - protein, 26 aa, Artificial Sequence
  Cyclic GFR-binding peptide
  MOD_RES (20)..(21): Xaa is C or S
VNSSDDYYLVTLPELKTPAXXPKPVY

SEQ ID NO: 7769 - protein, 15 aa, Artificial Sequence
  Cyclic GFR-binding peptide
  MOD_RES (14)..(15): Xaa is C or S
YYLITLPELRTPVXX

SEQ ID NO: 7770 - protein, 16 aa, Artificial Sequence
  Cyclic GFR-binding peptide
  MOD_RES (14)..(15): Xaa is C or S
IFLVSIPSLQTPAXXP

SEQ ID NO: 7771 - protein, 19 aa, Artificial Sequence
  Cyclic GFR-binding peptide
  MOD_RES (14)..(15): Xaa is C or S
IFLVSIPSLKTPAXXPKPV

SEQ ID NO: 7772 - protein, 24 aa, Artificial Sequence
  Cyclic GFR-binding peptide
  MOD_RES (18)..(19): Xaa is C or S
ENEDYYVMPLPELETPVXXAKPIK

SEQ ID NO: 7773 - protein, 16 aa, Artificial Sequence
  Cyclic GFR-binding peptide
IVNSSDDYYVVPLPEL

SEQ ID NO: 7774 - protein, 26 aa, Artificial Sequence
  Cyclic GFR-binding peptide
  MOD_RES (20)..(21): Xaa is C or S
VNNASDYYVIPLPELRTPVXXTPPTS

SEQ ID NO: 7775 - protein, 25 aa, Artificial Sequence
  Cyclic GFR-binding peptide
  MOD_RES (19)..(20): Xaa is C or S
NNASDLYLISIASLRTPVXXTPPTS

SEQ ID NO: 7776 - protein, 19 aa, Artificial Sequence
  Cyclic GFR-binding peptide
  MOD_RES (14)..(15): Xaa is C or S
YYVIPLPELRTPVXXTPPT

SEQ ID NO: 7777 - protein, 23 aa, Artificial Sequence
  Cyclic GFR-binding peptide
  MOD_RES (17)..(18): Xaa is C or S
YEDYYLMTLPELETPVXXAKPIS

SEQ ID NO: 7778 - protein, 23 aa, Artificial Sequence
  Cyclic GFR-binding peptide
  MOD_RES (17)..(18): Xaa is C or S
KGIYYVIPLPELDQSVXXPSASA

SEQ ID NO: 7779 - protein, 17 aa, Artificial Sequence
  Cyclic GFR-binding peptide
VVKDYEDYYLMTLPELE

SEQ ID NO: 7780 - protein, 15 aa, Artificial Sequence
  Cyclic GFR-binding peptide
  MOD_RES (14)..(15): Xaa is C or S
IFLVSIPSLKTPAXX

SEQ ID NO: 7781 - protein, 23 aa, Artificial Sequence
  Cyclic GFR-binding peptide
  MOD_RES (17)..(18): Xaa is C or S
YEDYYVMPLPELETPVXXAKPIS

SEQ ID NO: 7782 - protein, 21 aa, Artificial Sequence
  Cyclic GFR-binding peptide
  MOD_RES (15)..(16): Xaa is C or S
VYYVIPLPELDQPVXXPSASA

SEQ ID NO: 7783 - protein, 19 aa, Artificial Sequence
  Cyclic GFR-binding peptide
VVNNASDFYLISIANLRTP

SEQ ID NO: 7784 - protein, 18 aa, Artificial Sequence
  Cyclic GFR-binding peptide
  MOD_RES (14)..(15): Xaa is C or S
IFLVSIPSLKTPAXXPKP

SEQ ID NO: 7785 - protein, 22 aa, Artificial Sequence
  Cyclic GFR-binding peptide
  MOD_RES (16)..(17): Xaa is C or S
GIYYVIPLPELDQSVXXPSASA

SEQ ID NO: 7786 - protein, 22 aa, Artificial Sequence
  Cyclic GFR-binding peptide
  MOD_RES (16)..(16): Xaa is C or S
DDIFLVSIPSLKTPAXTPKTVH

SEQ ID NO: 7787 - protein, 18 aa, Artificial Sequence
  Cyclic GFR-binding peptide
  MOD_RES (14)..(15): Xaa is C or S
IFLVSIPSLQTPAXXPKP

SEQ ID NO: 7788 - protein, 18 aa, Artificial Sequence
  Cyclic GFR-binding peptide
VVNNASDLYLISIASLRT

SEQ ID NO: 7789 - protein, 19 aa, Artificial Sequence
  Cyclic GFR-binding peptide
  MOD_RES (14)..(14): Xaa is C or S
IFLVSIPSLKTPAXTPKTV

SEQ ID NO: 7790 - protein, 15 aa, Artificial Sequence
  Cyclic GFR-binding peptide
VVNNASDYYVIPLPE

SEQ ID NO: 7791 - protein, 21 aa, Artificial Sequence
  Cyclic GFR-binding peptide
  MOD_RES (15)..(16): Xaa is C or S
DIFLMSIPSLETPVXXAKPIK

SEQ ID NO: 7792 - protein, 18 aa, Artificial Sequence
  Cyclic GFR-binding peptide
IVNSSDDYYLVTLPELQT

SEQ ID NO: 7793 - protein, 22 aa, Artificial Sequence
  Cyclic GFR-binding peptide
  MOD_RES (16)..(17): Xaa is C or S
DDYYLVTLPELKTPAXXPKPVY

SEQ ID NO: 7794 - protein, 19 aa, Artificial Sequence
  Cyclic GFR-binding peptide
VVKENEDIFLMSIPSLETP

SEQ ID NO: 7795 - protein, 24 aa, Artificial Sequence
  Cyclic GFR-binding peptide
  MOD_RES (18)..(19): Xaa is C or S
SSDDIFLVSIPSLQTPAXXPKPVT

SEQ ID NO: 7796 - protein, 23 aa, Artificial Sequence
  Cyclic GFR-binding peptide
  MOD_RES (17)..(18): Xaa is C or S
RGVYYVIPLPELDQPVXXPSASA

SEQ ID NO: 7797 - protein, 18 aa, Artificial Sequence
  Cyclic GFR-binding peptide
IVNSSDDYYLVTLPELKT

SEQ ID NO: 7798 - protein, 21 aa, Artificial Sequence
  Cyclic GFR-binding peptide
  MOD_RES (15)..(16): Xaa is C or S
DYYVMPLPELETPVXXAKPIS

SEQ ID NO: 7799 - protein, 13 aa, Artificial Sequence
  Cyclic GFR-binding peptide
YYVIPLPELRTPV

SEQ ID NO: 7800 - protein, 20 aa, Artificial Sequence
  Cyclic GFR-binding peptide
  MOD_RES (14)..(15): Xaa is C or S
IFLMSIPSLETPVXXAKPIK

SEQ ID NO: 7801 - protein, 15 aa, Artificial Sequence
  Cyclic GFR-binding peptide
  MOD_RES (14)..(14): Xaa is C or S
YYLVTLPELKTPAXT

SEQ ID NO: 7802 - protein, 25 aa, Artificial Sequence
  Cyclic GFR-binding peptide
  MOD_RES (19)..(20): Xaa is C or S
NSSDDYYVVPLPELKTPAXXPKPVY

SEQ ID NO: 7803 - protein, 24 aa, Artificial Sequence
  Cyclic GFR-binding peptide
  MOD_RES (18)..(19): Xaa is C or S
NASDFYLISIANLRTPVXXTPPTS

SEQ ID NO: 7804 - protein, 18 aa, Artificial Sequence
  Cyclic GFR-binding peptide
  MOD_RES (14)..(15): Xaa is C or S
IFLISIPSLDQSVXXPSA

SEQ ID NO: 7805 - protein, 22 aa, Artificial Sequence
  Cyclic GFR-binding peptide
  MOD_RES (16)..(17): Xaa is C or S
GVYYVIPLPELDQPVXXPSASA

SEQ ID NO: 7806 - protein, 17 aa, Artificial Sequence
  Cyclic GFR-binding peptide
VVKENEDIFLMSIPSLE

SEQ ID NO: 7807 - protein, 19 aa, Artificial Sequence
  Cyclic GFR-binding peptide
IKPTKGIYYVIPLPELDQS

SEQ ID NO: 7808 - protein, 18 aa, Artificial Sequence
  Cyclic GFR-binding peptide
  MOD_RES (14)..(15): Xaa is C or S
YYLVTLPELKTPAXXPKP

SEQ ID NO: 7809 - protein, 18 aa, Artificial Sequence
  Cyclic GFR-binding peptide
VVKENEDYYVMPLPELET

SEQ ID NO: 7810 - protein, 21 aa, Artificial Sequence
  Cyclic GFR-binding peptide
  MOD_RES (15)..(16): Xaa is C or S
DIFLVSIPSLQTPAXXPKPVT

SEQ ID NO: 7811 - protein, 20 aa, Artificial Sequence
  Cyclic GFR-binding peptide
  MOD_RES (14)..(15): Xaa is C or S
IFLISIPSLAQPVXXPAASA

SEQ ID NO: 7812 - protein, 25 aa, Artificial Sequence
  Cyclic GFR-binding peptide
  MOD_RES (19)..(20): Xaa is C or S
PTKGIYYVIPLPELDQSVXXPSASA

SEQ ID NO: 7813 - protein, 21 aa, Artificial Sequence
  Cyclic GFR-binding peptide
  MOD_RES (15)..(16): Xaa is C or S
VIFLISIPSLAQPVXXPAASA

SEQ ID NO: 7814 - protein, 23 aa, Artificial Sequence
  Cyclic GFR-binding peptide
  MOD_RES (17)..(18): Xaa is C or S
ASDFYLISIANLRTPVXXTPPTS

SEQ ID NO: 7815 - protein, 22 aa, Artificial Sequence
  Cyclic GFR-binding peptide
  MOD_RES (16)..(17): Xaa is C or S
EDYYLMTLPELETPVXXAKPIS

SEQ ID NO: 7816 - protein, 13 aa, Artificial Sequence
  Cyclic GFR-binding peptide
YYLVTLPELQTPA

SEQ ID NO: 7817 - protein, 18 aa, Artificial Sequence
  Cyclic GFR-binding peptide
VVKDYEDIFLMSIPSLET

SEQ ID NO: 7818 - protein, 21 aa, Artificial Sequence
  Cyclic GFR-binding peptide
  MOD_RES (15)..(16): Xaa is C or S
DYYVMPLPELETPVXXAKPIK

SEQ ID NO: 7819 - protein, 18 aa, Artificial Sequence
  Cyclic GFR-binding peptide
  MOD_RES (14)..(15): Xaa is C or S
YYLITLPELRTPVXXTPP

SEQ ID NO: 7820 - protein, 18 aa, Artificial Sequence
  Cyclic GFR-binding peptide
  MOD_RES (14)..(15): Xaa is C or S
YYVVPLPELKTPAXXPKP

SEQ ID NO: 7821 - protein, 13 aa, Artificial Sequence
  Cyclic GFR-binding peptide
YYLITLPELRTPV

SEQ ID NO: 7822 - protein, 20 aa, Artificial Sequence
  Cyclic GFR-binding peptide
  MOD_RES (14)..(15): Xaa is C or S
IFLISIPSLDQPVXXPSASA

SEQ ID NO: 7823 - protein, 17 aa, Artificial Sequence
  Cyclic GFR-binding peptide
  MOD_RES (14)..(15): Xaa is C or S
IFLVSIPSLKTPAXXPK

SEQ ID NO: 7824 - protein, 21 aa, Artificial Sequence
  Cyclic GFR-binding peptide
  MOD_RES (15)..(16): Xaa is C or S
DIFLMSIPSLETPVXXAKPIS

SEQ ID NO: 7825 - protein, 19 aa, Artificial Sequence
  Cyclic GFR-binding peptide
VVKDYEDYYVMPLPELETP

SEQ ID NO: 7826 - protein, 26 aa, Artificial Sequence
  Cyclic GFR-binding peptide
  MOD_RES (20)..(21): Xaa is C or S
KPTRGVYYVIPLPELDQPVXXPSASA

SEQ ID NO: 7827 - protein, 27 aa, Artificial Sequence
  Cyclic GFR-binding peptide
  MOD_RES (21)..(22): Xaa is C or S
IKPTKGIYYVIPLPELDQSVXXPSASA

SEQ ID NO: 7828 - protein, 25 aa, Artificial Sequence
  Cyclic GFR-binding peptide
  MOD_RES (19)..(20): Xaa is C or S
KENEDIFLMSIPSLETPVXXAKPIK

SEQ ID NO: 7829 - protein, 16 aa, Artificial Sequence
  Cyclic GFR-binding peptide
  MOD_RES (14)..(15): Xaa is C or S
YYLITLPELAQPVXXP

SEQ ID NO: 7830 - protein, 21 aa, Artificial Sequence
  Cyclic GFR-binding peptide
  MOD_RES (15)..(16): Xaa is C or S
DYYVIPLPELRTPVXXTPPTS

SEQ ID NO: 7831 - protein, 21 aa, Artificial Sequence
  Cyclic GFR-binding peptide
  MOD_RES (15)..(16): Xaa is C or S
IYYVIPLPELDQSVXXPSASA

SEQ ID NO: 7832 - protein, 17 aa, Artificial Sequence
  Cyclic GFR-binding peptide
IVNSSDDIFLVSIPSLQ

SEQ ID NO: 7833 - protein, 17 aa, Artificial Sequence
  Cyclic GFR-binding peptide
IVNSSDDIFLVSIPSLK

SEQ ID NO: 7834 - protein, 22 aa, Artificial Sequence
  Cyclic GFR-binding peptide
  MOD_RES (16)..(17): Xaa is C or S
EDIFLMSIPSLETPVXXAKPIS

SEQ ID NO: 7835 - protein, 27 aa, Artificial Sequence
  Cyclic GFR-binding peptide
  MOD_RES (21)..(22): Xaa is C or S
VVKDYEDIFLMSIPSLETPVXXAKPIS

SEQ ID NO: 7836 - protein, 21 aa, Artificial Sequence
  Cyclic GFR-binding peptide
  MOD_RES (15)..(16): Xaa is C or S
DLYLISIASLRTPVXXTPPTS

SEQ ID NO: 7837 - protein, 17 aa, Artificial Sequence
  Cyclic GFR-binding peptide
  MOD_RES (14)..(15): Xaa is C or S
IFLMSIPSLETPVXXAK

SEQ ID NO: 7838 - protein, 16 aa, Artificial Sequence
  Cyclic GFR-binding peptide
VVKENEDYYLMTLPEL

SEQ ID NO: 7839 - protein, 17 aa, Artificial Sequence
  Cyclic GFR-binding peptide
  MOD_RES (14)..(15): Xaa is C or S
YYVVPLPELKTPAXXPK

SEQ ID NO: 7840 - protein, 24 aa, Artificial Sequence
  Cyclic GFR-binding peptide
  MOD_RES (18)..(18): Xaa is C or S
SSDDYYVVPLPELKTPAXTPKTVH

SEQ ID NO: 7841 - protein, 22 aa, Artificial Sequence
  Cyclic GFR-binding peptide
  MOD_RES (16)..(17): Xaa is C or S
DDYYVVPLPELKTPAXXPKPVY

SEQ ID NO: 7842 - protein, 19 aa, Artificial Sequence
  Cyclic GFR-binding peptide
  MOD_RES (14)..(15): Xaa is C or S
YYLITLPELRTPVXXTPPT

SEQ ID NO: 7843 - protein, 23 aa, Artificial Sequence
  Cyclic GFR-binding peptide
  MOD_RES (17)..(18): Xaa is C or S
RGVIFLISIPSLAQPVXXPAASA

SEQ ID NO: 7844 - protein, 25 aa, Artificial Sequence
  Cyclic GFR-binding peptide
  MOD_RES (19)..(20): Xaa is C or S
PTRGVYYVIPLPELDQPVXXPSASA

SEQ ID NO: 7845 - protein, 18 aa, Artificial Sequence
  Cyclic GFR-binding peptide
  MOD_RES (14)..(15): Xaa is C or S
IFLMSIPSLETPVXXAKP

SEQ ID NO: 7846 - protein, 22 aa, Artificial Sequence
  Cyclic GFR-binding peptide
  MOD_RES (16)..(17): Xaa is C or S
GVIFLISIPSLAQPVXXPAASA

SEQ ID NO: 7847 - protein, 18 aa, Artificial Sequence
  Cyclic GFR-binding peptide
  MOD_RES (14)..(15): Xaa is C or S
FYLISIANLRTPVXXTPP

SEQ ID NO: 7848 - protein, 27 aa, Artificial Sequence
  Cyclic GFR-binding peptide
  MOD_RES (21)..(22): Xaa is C or S
IVNSSDDYYVVPLPELKTPAXXPKPVY

SEQ ID NO: 7849 - protein, 22 aa, Artificial Sequence
  Cyclic GFR-binding peptide
  MOD_RES (16)..(16): Xaa is C or S
DDYYLVTLPELKTPAXTPKTVH

SEQ ID NO: 7850 - protein, 17 aa, Artificial Sequence
  Cyclic GFR-binding peptide
  MOD_RES (14)..(15): Xaa is C or S
YYLVTLPELKTPAXXPK

SEQ ID NO: 7851 - protein, 23 aa, Artificial Sequence
  Cyclic GFR-binding peptide
  MOD_RES (17)..(18): Xaa is C or S
NEDYYVMPLPELETPVXXAKPIK

SEQ ID NO: 7852 - protein, 24 aa, Artificial Sequence
  Cyclic GFR-binding peptide
  MOD_RES (18)..(19): Xaa is C or S
SSDDYYVVPLPELKTPAXXPKPVY

SEQ ID NO: 7853 - protein, 22 aa, Artificial Sequence
  Cyclic GFR-binding peptide
  MOD_RES (16)..(17): Xaa is C or S
DDYYVVPLPELQTPAXXPKPVT

SEQ ID NO: 7854 - protein, 20 aa, Artificial Sequence
  Cyclic GFR-binding peptide
  MOD_RES (14)..(15): Xaa is C or S
YYLITLPELAQPVXXPAASA

SEQ ID NO: 7855 - protein, 14 aa, Artificial Sequence
  Cyclic GFR-binding peptide
  MOD_RES (14)..(14): Xaa is C or S
YYVIPLPELDQPVX

SEQ ID NO: 7856 - protein, 17 aa, Artificial Sequence
  Cyclic GFR-binding peptide
VVNNASDLYLISIASLR

SEQ ID NO: 7857 - protein, 18 aa, Artificial Sequence
  Cyclic GFR-binding peptide
  MOD_RES (14)..(15): Xaa is C or S
YYLVTLPELQTPAXXPKP

SEQ ID NO: 7858 - protein, 15 aa, Artificial Sequence
  Cyclic GFR-binding peptide
  MOD_RES (14)..(15): Xaa is C or S
IFLMSIPSLETPVXX

SEQ ID NO: 7859 - protein, 22 aa, Artificial Sequence
  Cyclic GFR-binding peptide
  MOD_RES (16)..(17): Xaa is C or S
SDLYLISIASLRTPVXXTPPTS

SEQ ID NO: 7860 - protein, 19 aa, Artificial Sequence
  Cyclic GFR-binding peptide
VVKENEDYYVMPLPELETP

SEQ ID NO: 7861 - protein, 15 aa, Artificial Sequence
  Cyclic GFR-binding peptide
VKPKRGVIFLISIPS

SEQ ID NO: 7862 - protein, 17 aa, Artificial Sequence
  Cyclic GFR-binding peptide
  MOD_RES (14)..(15): Xaa is C or S
LYLISIASLRTPVXXTP

SEQ ID NO: 7863 - protein, 19 aa, Artificial Sequence
  Cyclic GFR-binding peptide
  MOD_RES (14)..(15): Xaa is C or S
FYLISIANLRTPVXXTPPT

SEQ ID NO: 7864 - protein, 19 aa, Artificial Sequence
  Cyclic GFR-binding peptide
IVNSSDDYYLVTLPELKTP

SEQ ID NO: 7865 - protein, 18 aa, Artificial Sequence
  Cyclic GFR-binding peptide
  MOD_RES (14)..(15): Xaa is C or S
YYLITLPELAQPVXXPAA

SEQ ID NO: 7866 - protein, 19 aa, Artificial Sequence
  Cyclic GFR-binding peptide
IVNSSDDYYLVTLPELQTP

SEQ ID NO: 7867 - protein, 20 aa, Artificial Sequence
  Cyclic GFR-binding peptide
  MOD_RES (14)..(15): Xaa is C or S
FYLISIANLRTPVXXTPPTS

SEQ ID NO: 7868 - protein, 13 aa, Artificial Sequence
  Cyclic GFR-binding peptide
FYLISIANLRTPV

SEQ ID NO: 7869 - protein, 27 aa, Artificial Sequence
  Cyclic GFR-binding peptide
  MOD_RES (21)..(22): Xaa is C or S
VVKENEDYYVMPLPELETPVXXAKPIK

SEQ ID NO: 7870 - protein, 17 aa, Artificial Sequence
  Cyclic GFR-binding peptide
  MOD_RES (14)..(15): Xaa is C or S
IFLISIPSLDQPVXXPS

SEQ ID NO: 7871 - protein, 18 aa, Artificial Sequence
  Cyclic GFR-binding peptide
IKPTKGIYYVIPLPELDQ

SEQ ID NO: 7872 - protein, 16 aa, Artificial Sequence
  Cyclic GFR-binding peptide
  MOD_RES (14)..(15): Xaa is C or S
IFLISIPSLAQPVXXP

SEQ ID NO: 7873 - protein, 25 aa, Artificial Sequence
  Cyclic GFR-binding peptide
  MOD_RES (19)..(20): Xaa is C or S
KDYEDIFLMSIPSLETPVXXAKPIS

SEQ ID NO: 7874 - protein, 25 aa, Artificial Sequence
  Cyclic GFR-binding peptide
  MOD_RES (19)..(20): Xaa is C or S
NSSDDYYLVTLPELKTPAXXPKPVY

SEQ ID NO: 7875 - protein, 26 aa, Artificial Sequence
  Cyclic GFR-binding peptide
  MOD_RES (20)..(21): Xaa is C or S
VKDYEDIFLMSIPSLETPVXXAKPIS

SEQ ID NO: 7876 - protein, 24 aa, Artificial Sequence
  Cyclic GFR-binding peptide
  MOD_RES (18)..(19): Xaa is C or S
TKGIIFLISIPSLDQSVXXPSASA

SEQ ID NO: 7877 - protein, 19 aa, Artificial Sequence
  Cyclic GFR-binding peptide
VKPTRGVYYVIPLPELDQP

SEQ ID NO: 7878 - protein, 22 aa, Artificial Sequence
  Cyclic GFR-binding peptide
  MOD_RES (16)..(17): Xaa is C or S
EDIFLMSIPSLETPVXXAKPIK

SEQ ID NO: 7879 - protein, 18 aa, Artificial Sequence
  Cyclic GFR-binding peptide
  MOD_RES (14)..(14): Xaa is C or S
YYVVPLPELKTPAXTPKT

SEQ ID NO: 7880 - protein, 18 aa, Artificial Sequence
  Cyclic GFR-binding peptide
VVNNASDYYVIPLPELRT

SEQ ID NO: 7881 - protein, 16 aa, Artificial Sequence
  Cyclic GFR-binding peptide
VVKDYEDYYVMPLPEL

SEQ ID NO: 7882 - protein, 15 aa, Artificial Sequence
  Cyclic GFR-binding peptide
  MOD_RES (14)..(15): Xaa is C or S
YYLITLPELAQPVXX

SEQ ID NO: 7883 - protein, 13 aa, Artificial Sequence
  Cyclic GFR-binding peptide
YYLVTLPELKTPA

SEQ ID NO: 7884 - protein, 14 aa, Artificial Sequence
  Cyclic GFR-binding peptide
  MOD_RES (14)..(14): Xaa is C or S
YYLITLPELAQPVX

SEQ ID NO: 7885 - protein, 17 aa, Artificial Sequence
  Cyclic GFR-binding peptide
  MOD_RES (14)..(15): Xaa is C or S
IFLISIPSLDQSVXXPS

SEQ ID NO: 7886 - protein, 25 aa, Artificial Sequence
  Cyclic GFR-binding peptide
  MOD_RES (19)..(20): Xaa is C or S
NSSDDYYVVPLPELQTPAXXPKPVT

SEQ ID NO: 7887 - protein, 26 aa, Artificial Sequence
  Cyclic GFR-binding peptide
  MOD_RES (20)..(21): Xaa is C or S
VNNASDYYLITLPELRTPVXXTPPTS

SEQ ID NO: 7888 - protein, 21 aa, Artificial Sequence
  Cyclic GFR-binding peptide
  MOD_RES (15)..(16): Xaa is C or S
DYYLMTLPELETPVXXAKPIS

SEQ ID NO: 7889 - protein, 27 aa, Artificial Sequence
  Cyclic GFR-binding peptide
  MOD_RES (21)..(22): Xaa is C or S
VVNNASDYYLITLPELRTPVXXTPPTS

SEQ ID NO: 7890 - protein, 19 aa, Artificial Sequence
  Cyclic GFR-binding peptide
VVNNASDYYLITLPELRTP

SEQ ID NO: 7891 - protein, 18 aa, Artificial Sequence
  Cyclic GFR-binding peptide
IVNSSDDYYVVPLPELKT

SEQ ID NO: 7892 - protein, 25 aa, Artificial Sequence
  Cyclic GFR-binding peptide
  MOD_RES (19)..(20): Xaa is C or S
NSSDDIFLVSIPSLQTPAXXPKPVT

SEQ ID NO: 7893 - protein, 15 aa, Artificial Sequence
  Cyclic GFR-binding peptide
IKPTKGIIFLISIPS

SEQ ID NO: 7894 - protein, 23 aa, Artificial Sequence
  Cyclic GFR-binding peptide
  MOD_RES (17)..(18): Xaa is C or S
ASDLYLISIASLRTPVXXTPPTS

SEQ ID NO: 7895 - protein, 18 aa, Artificial Sequence
  Cyclic GFR-binding peptide
  MOD_RES (14)..(15): Xaa is C or S
YYVVPLPELQTPAXXPKP

SEQ ID NO: 7896 - protein, 16 aa, Artificial Sequence
  Cyclic GFR-binding peptide
IVNSSDDYYLVTLPEL

SEQ ID NO: 7897 - protein, 17 aa, Artificial Sequence
  Cyclic GFR-binding peptide
  MOD_RES (14)..(15): Xaa is C or S
FYLISIANLRTPVXXTP

SEQ ID NO: 7898 - protein, 18 aa, Artificial Sequence
  Cyclic GFR-binding peptide
IVNSSDDYYVVPLPELQT

SEQ ID NO: 7899 - protein, 24 aa, Artificial Sequence
  Cyclic GFR-binding peptide
  MOD_RES (18)..(19): Xaa is C or S
SSDDYYLVTLPELQTPAXXPKPVT

SEQ ID NO: 7900 - protein, 13 aa, Artificial Sequence
  Cyclic GFR-binding peptide
YYVVPLPELQTPA

SEQ ID NO: 7901 - protein, 16 aa, Artificial Sequence
  Cyclic GFR-binding peptide
  MOD_RES (14)..(15): Xaa is C or S
IFLISIPSLDQSVXXP

SEQ ID NO: 7902 - protein, 21 aa, Artificial Sequence
  Cyclic GFR-binding peptide
  MOD_RES (15)..(16): Xaa is C or S
DYYLVTLPELQTPAXXPKPVT

SEQ ID NO: 7903 - protein, 16 aa, Artificial Sequence
  Cyclic GFR-binding peptide
  MOD_RES (14)..(15): Xaa is C or S
YYVMPLPELETPVXXA

SEQ ID NO: 7904 - protein, 18 aa, Artificial Sequence
  Cyclic GFR-binding peptide
  MOD_RES (14)..(15): Xaa is C or S
LYLISIASLRTPVXXTPP

SEQ ID NO: 7905 - protein, 18 aa, Artificial Sequence
  Cyclic GFR-binding peptide
VKPTRGVIFLISIPSLDQ

SEQ ID NO: 7906 - protein, 14 aa, Artificial Sequence
  Cyclic GFR-binding peptide
  MOD_RES (14)..(14): Xaa is C or S
IFLMSIPSLETPVX

SEQ ID NO: 7907 - protein, 14 aa, Artificial Sequence
  Cyclic GFR-binding peptide
  MOD_RES (14)..(14): Xaa is C or S
IFLISIPSLAQPVX

SEQ ID NO: 7908 - protein, 13 aa, Artificial Sequence
  Cyclic GFR-binding peptide
YYVIPLPELDQPV

SEQ ID NO: 7909 - protein, 22 aa, Artificial Sequence
  Cyclic GFR-binding peptide
  MOD_RES (16)..(17): Xaa is C or S
DDYYLVTLPELQTPAXXPKPVT

SEQ ID NO: 7910 - protein, 17 aa, Artificial Sequence
  Cyclic GFR-binding peptide
VVNNASDYYVIPLPELR

SEQ ID NO: 7911 - protein, 17 aa, Artificial Sequence
  Cyclic GFR-binding peptide
  MOD_RES (14)..(15): Xaa is C or S
YYLVTLPELQTPAXXPK

SEQ ID NO: 7912 - protein, 18 aa, Artificial Sequence
  Cyclic GFR-binding peptide
  MOD_RES (14)..(14): Xaa is C or S
YYLVTLPELKTPAXTPKT

SEQ ID NO: 7913 - protein, 16 aa, Artificial Sequence
  Cyclic GFR-binding peptide
  MOD_RES (14)..(15): Xaa is C or S
YYVVPLPELKTPAXXP

SEQ ID NO: 7914 - protein, 15 aa, Artificial Sequence
  Cyclic GFR-binding peptide
VVKDYEDIFLMSIPS

SEQ ID NO: 7915 - protein, 13 aa, Artificial Sequence
  Cyclic GFR-binding peptide
LYLISIASLRTPV

SEQ ID NO: 7916 - protein, 16 aa, Artificial Sequence
  Cyclic GFR-binding peptide
  MOD_RES (14)..(14): Xaa is C or S
YYLVTLPELKTPAXTP

SEQ ID NO: 7917 - protein, 19 aa, Artificial Sequence
  Cyclic GFR-binding peptide
  MOD_RES (14)..(15): Xaa is C or S
IFLISIPSLDQPVXXPSAS

SEQ ID NO: 7918 - protein, 20 aa, Artificial Sequence
  Cyclic GFR-binding peptide
  MOD_RES (14)..(15): Xaa is C or S
IFLVSIPSLKTPAXXPKPVY

SEQ ID NO: 7919 - protein, 16 aa, Artificial Sequence
  Cyclic GFR-binding peptide
  MOD_RES (14)..(15): Xaa is C or S
IFLMSIPSLETPVXXA

SEQ ID NO: 7920 - protein, 13 aa, Artificial Sequence
  Cyclic GFR-binding peptide
YYLMTLPELETPV

SEQ ID NO: 7921 - protein, 15 aa, Artificial Sequence
  Cyclic GFR-binding peptide
  MOD_RES (14)..(15): Xaa is C or S
YYLMTLPELETPVXX

SEQ ID NO: 7922 - protein, 24 aa, Artificial Sequence
  Cyclic GFR-binding peptide
  MOD_RES (18)..(19): Xaa is C or S
KRGVYYLITLPELAQPVXXPAASA

SEQ ID NO: 7923 - protein, 15 aa, Artificial Sequence
  Cyclic GFR-binding peptide
  MOD_RES (14)..(15): Xaa is C or S
IFLISIPSLDQSVXX

SEQ ID NO: 7924 - protein, 18 aa, Artificial Sequence
  Cyclic GFR-binding peptide
IVNSSDDIFLVSIPSLKT

SEQ ID NO: 7925 - protein, 17 aa, Artificial Sequence
  Cyclic GFR-binding peptide
  MOD_RES (14)..(14): Xaa is C or S
IFLVSIPSLKTPAXTPK

SEQ ID NO: 7926 - protein, 17 aa, Artificial Sequence
  Cyclic GFR-binding peptide
  MOD_RES (14)..(15): Xaa is C or S
YYVVPLPELQTPAXXPK

SEQ ID NO: 7927 - protein, 14 aa, Artificial Sequence
  Cyclic GFR-binding peptide
  MOD_RES (14)..(14): Xaa is C or S
YYVVPLPELQTPAX

SEQ ID NO: 7928 - protein, 18 aa, Artificial Sequence
  Cyclic GFR-binding peptide
VVKENEDYYLMTLPELET

SEQ ID NO: 7929 - protein, 17 aa, Artificial Sequence
  Cyclic GFR-binding peptide
  MOD_RES (14)..(14): Xaa is C or S
YYVVPLPELKTPAXTPK

SEQ ID NO: 7930 - protein, 18 aa, Artificial Sequence
  Cyclic GFR-binding peptide
IVNSSDDIFLVSIPSLQT

SEQ ID NO: 7931 - protein, 19 aa, Artificial Sequence
  Cyclic GFR-binding peptide
  MOD_RES (14)..(15): Xaa is C or S
IFLMSIPSLETPVXXAKPI

SEQ ID NO: 7932 - protein, 26 aa, Artificial Sequence
  Cyclic GFR-binding peptide
  MOD_RES (20)..(21): Xaa is C or S
VNSSDDYYVVPLPELQTPAXXPKPVT

SEQ ID NO: 7933 - protein, 19 aa, Artificial Sequence
  Cyclic GFR-binding peptide
  MOD_RES (14)..(15): Xaa is C or S
LYLISIASLRTPVXXTPPT

SEQ ID NO: 7934 - protein, 16 aa, Artificial Sequence
  Cyclic GFR-binding peptide
  MOD_RES (14)..(14): Xaa is C or S
YYVVPLPELKTPAXTP

SEQ ID NO: 7935 - protein, 17 aa, Artificial Sequence
  Cyclic GFR-binding peptide
  MOD_RES (14)..(15): Xaa is C or S
YYVIPLPELDQSVXXPS

SEQ ID NO: 7936 - protein, 16 aa, Artificial Sequence
  Cyclic GFR-binding peptide
  MOD_RES (14)..(15): Xaa is C or S
YYLVTLPELKTPAXXP

SEQ ID NO: 7937 - protein, 25 aa, Artificial Sequence
  Cyclic GFR-binding peptide
  MOD_RES (19)..(19): Xaa is C or S
NSSDDYYLVTLPELKTPAXTPKTVH

SEQ ID NO: 7938 - protein, 23 aa, Artificial Sequence
  Cyclic GFR-binding peptide
  MOD_RES (17)..(18): Xaa is C or S
SDDYYVVPLPELQTPAXXPKPVT

SEQ ID NO: 7939 - protein, 15 aa, Artificial Sequence
  Cyclic GFR-binding peptide
VVKENEDYYVMPLPE

SEQ ID NO: 7940 - protein, 19 aa, Artificial Sequence
  Cyclic GFR-binding peptide
  MOD_RES (14)..(15): Xaa is C or S
IFLISIPSLAQPVXXPAAS

SEQ ID NO: 7941 - protein, 13 aa, Artificial Sequence
  Cyclic GFR-binding peptide
IFLISIPSLDQPV

SEQ ID NO: 7942 - protein, 13 aa, Artificial Sequence
  Cyclic GFR-binding peptide
IFLMSIPSLETPV

SEQ ID NO: 7943 - protein, 17 aa, Artificial Sequence
  Cyclic GFR-binding peptide
VVKDYEDIFLMSIPSLE

SEQ ID NO: 7944 - protein, 16 aa, Artificial Sequence
  Cyclic GFR-binding peptide
  MOD_RES (14)..(15): Xaa is C or S
YYLITLPELRTPVXXT

SEQ ID NO: 7945 - protein, 26 aa, Artificial Sequence
  Cyclic GFR-binding peptide
  MOD_RES (20)..(21): Xaa is C or S
KPKRGVYYLITLPELAQPVXXPAASA

SEQ ID NO: 7946 - protein, 21 aa, Artificial Sequence
  Cyclic GFR-binding peptide
  MOD_RES (15)..(16): Xaa is C or S
IIFLISIPSLDQSVXXPSASA

SEQ ID NO: 7947 - protein, 16 aa, Artificial Sequence
  Cyclic GFR-binding peptide
  MOD_RES (14)..(14): Xaa is C or S
IFLVSIPSLKTPAXTP

SEQ ID NO: 7948 - protein, 17 aa, Artificial Sequence
  Cyclic GFR-binding peptide
  MOD_RES (14)..(14): Xaa is C or S
YYLVTLPELKTPAXTPK

SEQ ID NO: 7949 - protein, 14 aa, Artificial Sequence
  Cyclic GFR-binding peptide
  MOD_RES (14)..(14): Xaa is C or S
IFLISIPSLDQSVX

SEQ ID NO: 7950 - protein, 17 aa, Artificial Sequence
  Cyclic GFR-binding peptide
VVKENEDYYVMPLPELE

SEQ ID NO: 7951 - protein, 18 aa, Artificial Sequence
  Cyclic GFR-binding peptide
VKPKRGVIFLISIPSLAQ

SEQ ID NO: 7952 - protein, 16 aa, Artificial Sequence
  Cyclic GFR-binding peptide
  MOD_RES (14)..(15): Xaa is C or S
YYLMTLPELETPVXXA

SEQ ID NO: 7953 - protein, 16 aa, Artificial Sequence
  Cyclic GFR-binding peptide
VKPTRGVYYVIPLPEL

SEQ ID NO: 7954 - protein, 25 aa, Artificial Sequence
  Cyclic GFR-binding peptide
  MOD_RES (19)..(20): Xaa is C or S
KDYEDYYVMPLPELETPVXXAKPIS

SEQ ID NO: 7955 - protein, 14 aa, Artificial Sequence
  Cyclic GFR-binding peptide
  MOD_RES (14)..(14): Xaa is C or S
YYLVTLPELQTPAX

SEQ ID NO: 7956 - protein, 15 aa, Artificial Sequence
  Cyclic GFR-binding peptide
  MOD_RES (14)..(15): Xaa is C or S
YYVIPLPELDQPVXX

SEQ ID NO: 7957 - protein, 13 aa, Artificial Sequence
  Cyclic GFR-binding peptide
IFLISIPSLDQSV

SEQ ID NO: 7958 - protein, 19 aa, Artificial Sequence
  Cyclic GFR-binding peptide
  MOD_RES (14)..(15): Xaa is C or S
YYLMTLPELETPVXXAKPI

SEQ ID NO: 7959 - protein, 15 aa, Artificial Sequence
  Cyclic GFR-binding peptide
  MOD_RES (14)..(15): Xaa is C or S
IFLISIPSLAQPVXX

SEQ ID NO: 7960 - protein, 26 aa, Artificial Sequence
  Cyclic GFR-binding peptide
  MOD_RES (20)..(21): Xaa is C or S
KPTKGIIFLISIPSLDQSVXXPSASA

SEQ ID NO: 7961 - protein, 19 aa, Artificial Sequence
  Cyclic GFR-binding peptide
VVKENEDYYLMTLPELETP

SEQ ID NO: 7962 - protein, 27 aa, Artificial Sequence
  Cyclic GFR-binding peptide
  MOD_RES (21)..(22): Xaa is C or S
IKPTKGIIFLISIPSLDQSVXXPSASA

SEQ ID NO: 7963 - protein, 23 aa, Artificial Sequence
  Cyclic GFR-binding peptide
  MOD_RES (17)..(18): Xaa is C or S
NEDIFLMSIPSLETPVXXAKPIK

SEQ ID NO: 7964 - protein, 16 aa, Artificial Sequence
  Cyclic GFR-binding peptide
  MOD_RES (14)..(15): Xaa is C or S
IFLVSIPSLKTPAXXP

SEQ ID NO: 7965 - protein, 17 aa, Artificial Sequence
  Cyclic GFR-binding peptide
  MOD_RES (14)..(15): Xaa is C or S
YYLITLPELAQPVXXPA

SEQ ID NO: 7966 - protein, 19 aa, Artificial Sequence
  Cyclic GFR-binding peptide
  MOD_RES (14)..(15): Xaa is C or S
YYVIPLPELDQPVXXPSAS

SEQ ID NO: 7967 - protein, 27 aa, Artificial Sequence
  Cyclic GFR-binding peptide
  MOD_RES (21)..(22): Xaa is C or S
IVNSSDDYYLVTLPELKTPAXXPKPVY

SEQ ID NO: 7968 - protein, 19 aa, Artificial Sequence
  Cyclic GFR-binding peptide
VVKDYEDIFLMSIPSLETP

SEQ ID NO: 7969 - protein, 26 aa, Artificial Sequence
  Cyclic GFR-binding peptide
  MOD_RES (20)..(21): Xaa is C or S
VKENEDYYLMTLPELETPVXXAKPIK

SEQ ID NO: 7970 - protein, 14 aa, Artificial Sequence
  Cyclic GFR-binding peptide
  MOD_RES (14)..(14): Xaa is C or S
IFLVSIPSLQTPAX

SEQ ID NO: 7971 - protein, 19 aa, Artificial Sequence
  Cyclic GFR-binding peptide
  MOD_RES (14)..(15): Xaa is C or S
IFLVSIPSLQTPAXXPKPV

SEQ ID NO: 7972 - protein, 17 aa, Artificial Sequence
  Cyclic GFR-binding peptide
IKPTKGIIFLISIPSLD

SEQ ID NO: 7973 - protein, 20 aa, Artificial Sequence
  Cyclic GFR-binding peptide
  MOD_RES (14)..(15): Xaa is C or S
IFLVSIPSLQTPAXXPKPVT

SEQ ID NO: 7974 - protein, 14 aa, Artificial Sequence
  Cyclic GFR-binding peptide
  MOD_RES (14)..(14): Xaa is C or S
YYVIPLPELDQSVX

SEQ ID NO: 7975 - protein, 24 aa, Artificial Sequence
  Cyclic GFR-binding peptide
  MOD_RES (18)..(18): Xaa is C or S
SSDDIFLVSIPSLKTPAXTPKTVH

SEQ ID NO: 7976 - protein, 13 aa, Artificial Sequence
  Cyclic GFR-binding peptide
YYVMPLPELETPV

SEQ ID NO: 7977 - protein, 15 aa, Artificial Sequence
  Cyclic GFR-binding peptide
  MOD_RES (14)..(15): Xaa is C or S
YYVMPLPELETPVXX

SEQ ID NO: 7978 - protein, 27 aa, Artificial Sequence
  Cyclic GFR-binding peptide
  MOD_RES (21)..(21): Xaa is C or S
IVNSSDDIFLVSIPSLKTPAXTPKTVH

SEQ ID NO: 7979 - protein, 23 aa, Artificial Sequence
  Cyclic GFR-binding peptide
  MOD_RES (17)..(17): Xaa is C or S
SDDYYVVPLPELKTPAXTPKTVH

SEQ ID NO: 7980 - protein, 13 aa, Artificial Sequence
  Cyclic GFR-binding peptide
IFLVSIPSLQTPA

SEQ ID NO: 7981 - protein, 18 aa, Artificial Sequence
  Cyclic GFR-binding peptide
IKPTKGIIFLISIPSLDQ

SEQ ID NO: 7982 - protein, 25 aa, Artificial Sequence
  Cyclic GFR-binding peptide
  MOD_RES (19)..(20): Xaa is C or S
PKRGVIFLISIPSLAQPVXXPAASA

SEQ ID NO: 7983 - protein, 21 aa, Artificial Sequence
  Cyclic GFR-binding peptide
  MOD_RES (15)..(16): Xaa is C or S
DFYLISIANLRTPVXXTPPTS

SEQ ID NO: 7984 - protein, 16 aa, Artificial Sequence
  Cyclic GFR-binding peptide
VVKENEDYYVMPLPEL

SEQ ID NO: 7985 - protein, 16 aa, Artificial Sequence
  Cyclic GFR-binding peptide
VVKDYEDIFLMSIPSL

SEQ ID NO: 7986 - protein, 13 aa, Artificial Sequence
  Cyclic GFR-binding peptide
YYVIPLPELDQSV

SEQ ID NO: 7987 - protein, 26 aa, Artificial Sequence
  Cyclic GFR-binding peptide
  MOD_RES (20)..(21): Xaa is C or S
KPTRGVIFLISIPSLDQPVXXPSASA

SEQ ID NO: 7988 - protein, 19 aa, Artificial Sequence
  Cyclic GFR-binding peptide
  MOD_RES (14)..(15): Xaa is C or S
YYLVTLPELQTPAXXPKPV

SEQ ID NO: 7989 - protein, 14 aa, Artificial Sequence
  Cyclic GFR-binding peptide
  MOD_RES (14)..(14): Xaa is C or S
YYLMTLPELETPVX

SEQ ID NO: 7990 - protein, 27 aa, Artificial Sequence
  Cyclic GFR-binding peptide
  MOD_RES (21)..(22): Xaa is C or S
VKPTRGVYYVIPLPELDQPVXXPSASA

SEQ ID NO: 7991 - protein, 20 aa, Artificial Sequence
  Cyclic GFR-binding peptide
  MOD_RES (14)..(15): Xaa is C or S
YYLVTLPELKTPAXXPKPVY

SEQ ID NO: 7992 - protein, 14 aa, Artificial Sequence
  Cyclic GFR-binding peptide
  MOD_RES (14)..(14): Xaa is C or S
YYVMPLPELETPVX

SEQ ID NO: 7993 - protein, 25 aa, Artificial Sequence
  Cyclic GFR-binding peptide
  MOD_RES (19)..(20): Xaa is C or S
KDYEDYYLMTLPELETPVXXAKPIS

SEQ ID NO: 7994 - protein, 17 aa, Artificial Sequence
  Cyclic GFR-binding peptide
  MOD_RES (14)..(15): Xaa is C or S
YYVIPLPELDQPVXXPS

SEQ ID NO: 7995 - protein, 13 aa, Artificial Sequence
  Cyclic GFR-binding peptide
IFLISIPSLAQPV

SEQ ID NO: 7996 - protein, 17 aa, Artificial Sequence
  Cyclic GFR-binding peptide
VVNNASDFYLISIANLR

SEQ ID NO: 7997 - protein, 16 aa, Artificial Sequence
  Cyclic GFR-binding peptide
  MOD_RES (14)..(15): Xaa is C or S
FYLISIANLRTPVXXT

SEQ ID NO: 7998 - protein, 17 aa, Artificial Sequence
  Cyclic GFR-binding peptide
VKPKRGVIFLISIPSLA

SEQ ID NO: 7999 - protein, 15 aa, Artificial Sequence
  Cyclic GFR-binding peptide
  MOD_RES (14)..(15): Xaa is C or S
YYVIPLPELDQSVXX

SEQ ID NO: 8000 - protein, 18 aa, Artificial Sequence
  Cyclic GFR-binding peptide
VVNNASDYYLITLPELRT

SEQ ID NO: 8001 - protein, 20 aa, Artificial Sequence
  Cyclic GFR-binding peptide
  MOD_RES (14)..(15): Xaa is C or S
YYLVTLPELQTPAXXPKPVT

SEQ ID NO: 8002 - protein, 26 aa, Artificial Sequence
  Cyclic GFR-binding peptide
  MOD_RES (20)..(20): Xaa is C or S
VNSSDDYYVVPLPELKTPAXTPKTVH

SEQ ID NO: 8003 - protein, 19 aa, Artificial Sequence
  Cyclic GFR-binding peptide
VKPTRGVIFLISIPSLDQP

SEQ ID NO: 8004 - protein, 16 aa, Artificial Sequence
  Cyclic GFR-binding peptide
VVKENEDIFLMSIPSL

SEQ ID NO: 8005 - protein, 15 aa, Artificial Sequence
  Cyclic GFR-binding peptide
  MOD_RES (14)..(15): Xaa is C or S
IFLISIPSLDQPVXX

SEQ ID NO: 8006 - protein, 19 aa, Artificial Sequence
  Cyclic GFR-binding peptide
  MOD_RES (14)..(15): Xaa is C or S
YYLITLPELAQPVXXPAAS

SEQ ID NO: 8007 - protein, 14 aa, Artificial Sequence
  Cyclic GFR-binding peptide
  MOD_RES (14)..(14): Xaa is C or S
IFLISIPSLDQPVX

SEQ ID NO: 8008 - protein, 19 aa, Artificial Sequence
  Cyclic GFR-binding peptide
VKPKRGVIFLISIPSLAQP

SEQ ID NO: 8009 - protein, 22 aa, Artificial Sequence
  Cyclic GFR-binding peptide
  MOD_RES (16)..(17): Xaa is C or S
SDFYLISIANLRTPVXXTPPTS

SEQ ID NO: 8010 - protein, 17 aa, Artificial Sequence
  Cyclic GFR-binding peptide
  MOD_RES (14)..(15): Xaa is C or S
YYLITLPELRTPVXXTP

SEQ ID NO: 8011 - protein, 16 aa, Artificial Sequence
  Cyclic GFR-binding peptide
VVNNASDYYLITLPEL

SEQ ID NO: 8012 - protein, 23 aa, Artificial Sequence
  Cyclic GFR-binding peptide
  MOD_RES (17)..(17): Xaa is C or S
SDDIFLVSIPSLKTPAXTPKTVH

SEQ ID NO: 8013 - protein, 24 aa, Artificial Sequence
  Cyclic GFR-binding peptide
  MOD_RES (18)..(19): Xaa is C or S
TKGIYYVIPLPELDQSVXXPSASA

SEQ ID NO: 8014 - protein, 21 aa, Artificial Sequence
  Cyclic GFR-binding peptide
  MOD_RES (15)..(15): Xaa is C or S
DYYLVTLPELKTPAXTPKTVH

SEQ ID NO: 8015 - protein, 25 aa, Artificial Sequence
  Cyclic GFR-binding peptide
  MOD_RES (19)..(20): Xaa is C or S
NSSDDIFLVSIPSLKTPAXXPKPVY

SEQ ID NO: 8016 - protein, 21 aa, Artificial Sequence
  Cyclic GFR-binding peptide
  MOD_RES (15)..(16): Xaa is C or S
VIFLISIPSLDQPVXXPSASA

SEQ ID NO: 8017 - protein, 18 aa, Artificial Sequence
  Cyclic GFR-binding peptide
  MOD_RES (14)..(15): Xaa is C or S
YYVIPLPELRTPVXXTPP

SEQ ID NO: 8018 - protein, 19 aa, Artificial Sequence
  Cyclic GFR-binding peptide
VVNNASDYYVIPLPELRTP

SEQ ID NO: 8019 - protein, 15 aa, Artificial Sequence
  Cyclic GFR-binding peptide
  MOD_RES (14)..(15): Xaa is C or S
IFLVSIPSLQTPAXX

SEQ ID NO: 8020 - protein, 15 aa, Artificial Sequence
  Cyclic GFR-binding peptide
VVKENEDYYLMTLPE

SEQ ID NO: 8021 - protein, 24 aa, Artificial Sequence
  Cyclic GFR-binding peptide
  MOD_RES (18)..(19): Xaa is C or S
NASDYYLITLPELRTPVXXTPPTS

SEQ ID NO: 8022 - protein, 23 aa, Artificial Sequence
  Cyclic GFR-binding peptide
  MOD_RES (17)..(18): Xaa is C or S
RGVYYLITLPELAQPVXXPAASA

SEQ ID NO: 8023 - protein, 25 aa, Artificial Sequence
  Cyclic GFR-binding peptide
  MOD_RES (19)..(20): Xaa is C or S
PTKGIIFLISIPSLDQSVXXPSASA

SEQ ID NO: 8024 - protein, 16 aa, Artificial Sequence
  Cyclic GFR-binding peptide
  MOD_RES (14)..(15): Xaa is C or S
LYLISIASLRTPVXXT

SEQ ID NO: 8025 - protein, 18 aa, Artificial Sequence
  Cyclic GFR-binding peptide
  MOD_RES (14)..(14): Xaa is C or S
IFLVSIPSLKTPAXTPKT

SEQ ID NO: 8026 - protein, 19 aa, Artificial Sequence
  Cyclic GFR-binding peptide
  MOD_RES (14)..(15): Xaa is C or S
YYVMPLPELETPVXXAKPI

SEQ ID NO: 8027 - protein, 24 aa, Artificial Sequence
  Cyclic GFR-binding peptide
  MOD_RES (18)..(19): Xaa is C or S
DYEDYYLMTLPELETPVXXAKPIS

SEQ ID NO: 8028 - protein, 16 aa, Artificial Sequence
  Cyclic GFR-binding peptide
VKPKRGVYYLITLPEL

SEQ ID NO: 8029 - protein, 17 aa, Artificial Sequence
  Cyclic GFR-binding peptide
VKPTRGVIFLISIPSLD

SEQ ID NO: 8030 - protein, 19 aa, Artificial Sequence
  Cyclic GFR-binding peptide
  MOD_RES (14)..(15): Xaa is C or S
YYVIPLPELDQSVXXPSAS

SEQ ID NO: 8031 - protein, 18 aa, Artificial Sequence
  Cyclic GFR-binding peptide
VVKDYEDYYVMPLPELET

SEQ ID NO: 8032 - protein, 27 aa, Artificial Sequence
  Cyclic GFR-binding peptide
  MOD_RES (21)..(22): Xaa is C or S
IVNSSDDYYLVTLPELQTPAXXPKPVT

SEQ ID NO: 8033 - protein, 17 aa, Artificial Sequence
  Cyclic GFR-binding peptide
  MOD_RES (14)..(15): Xaa is C or S
IFLVSIPSLQTPAXXPK

SEQ ID NO: 8034 - protein, 20 aa, Artificial Sequence
  Cyclic GFR-binding peptide
  MOD_RES (14)..(15): Xaa is C or S
YYVVPLPELKTPAXXPKPVY

SEQ ID NO: 8035 - protein, 27 aa, Artificial Sequence
  Cyclic GFR-binding peptide
  MOD_RES (21)..(22): Xaa is C or S
VVKENEDIFLMSIPSLETPVXXAKPIK

SEQ ID NO: 8036 - protein, 27 aa, Artificial Sequence
  Cyclic GFR-binding peptide
  MOD_RES (21)..(22): Xaa is C or S
VVNNASDFYLISIANLRTPVXXTPPTS

SEQ ID NO: 8037 - protein, 26 aa, Artificial Sequence
  Cyclic GFR-binding peptide
  MOD_RES (20)..(21): Xaa is C or S
KPTKGIYYVIPLPELDQSVXXPSASA

SEQ ID NO: 8038 - protein, 20 aa, Artificial Sequence
  Cyclic GFR-binding peptide
  MOD_RES (14)..(15): Xaa is C or S
YYLITLPELRTPVXXTPPTS

SEQ ID NO: 8039 - protein, 24 aa, Artificial Sequence
  Cyclic GFR-binding peptide
  MOD_RES (18)..(19): Xaa is C or S
ENEDIFLMSIPSLETPVXXAKPIK

SEQ ID NO: 8040 - protein, 25 aa, Artificial Sequence
  Cyclic GFR-binding peptide
  MOD_RES (19)..(20): Xaa is C or S
NNASDYYLITLPELRTPVXXTPPTS

SEQ ID NO: 8041 - protein, 22 aa, Artificial Sequence
  Cyclic GFR-binding peptide
  MOD_RES (16)..(17): Xaa is C or S
GIIFLISIPSLDQSVXXPSASA

SEQ ID NO: 8042 - protein, 23 aa, Artificial Sequence
  Cyclic GFR-binding peptide
  MOD_RES (17)..(18): Xaa is C or S
NEDYYLMTLPELETPVXXAKPIK

SEQ ID NO: 8043 - protein, 26 aa, Artificial Sequence
  Cyclic GFR-binding peptide
  MOD_RES (20)..(21): Xaa is C or S
VNNASDFYLISIANLRTPVXXTPPTS

SEQ ID NO: 8044 - protein, 18 aa, Artificial Sequence
  Cyclic GFR-binding peptide
  MOD_RES (14)..(15): Xaa is C or S
YYVMPLPELETPVXXAKP

SEQ ID NO: 8045 - protein, 23 aa, Artificial Sequence
  Cyclic GFR-binding peptide
  MOD_RES (17)..(18): Xaa is C or S
YEDIFLMSIPSLETPVXXAKPIS

SEQ ID NO: 8046 - protein, 21 aa, Artificial Sequence
  Cyclic GFR-binding peptide
  MOD_RES (15)..(16): Xaa is C or S
DYYLMTLPELETPVXXAKPIK

SEQ ID NO: 8047 - protein, 18 aa, Artificial Sequence
  Cyclic GFR-binding peptide
  MOD_RES (14)..(15): Xaa is C or S
YYVIPLPELDQSVXXPSA

SEQ ID NO: 8048 - protein, 17 aa, Artificial Sequence
  Cyclic GFR-binding peptide
VVKENEDYYLMTLPELE

SEQ ID NO: 8049 - protein, 23 aa, Artificial Sequence
  Cyclic GFR-binding peptide
  MOD_RES (17)..(17): Xaa is C or S
SDDYYLVTLPELKTPAXTPKTVH

SEQ ID NO: 8050 - protein, 27 aa, Artificial Sequence
  Cyclic GFR-binding peptide
  MOD_RES (21)..(22): Xaa is C or S
VVNNASDLYLISIASLRTPVXXTPPTS

SEQ ID NO: 8051 - protein, 15 aa, Artificial Sequence
  Cyclic GFR-binding peptide
IVNSSDDIFLVSIPS

SEQ ID NO: 8052 - protein, 23 aa, Artificial Sequence
  Cyclic GFR-binding peptide
  MOD_RES (17)..(18): Xaa is C or S
ASDYYLITLPELRTPVXXTPPTS

SEQ ID NO: 8053 - protein, 13 aa, Artificial Sequence
  Cyclic GFR-binding peptide
YYLITLPELAQPV

SEQ ID NO: 8054 - protein, 17 aa, Artificial Sequence
  Cyclic GFR-binding peptide
  MOD_RES (14)..(15): Xaa is C or S
YYVIPLPELRTPVXXTP

SEQ ID NO: 8055 - protein, 15 aa, Artificial Sequence
  Cyclic GFR-binding peptide
VKPTRGVYYVIPLPE

SEQ ID NO: 8056 - protein, 15 aa, Artificial Sequence
  Cyclic GFR-binding peptide
VVKDYEDYYVMPLPE

SEQ ID NO: 8057 - protein, 26 aa, Artificial Sequence
  Cyclic GFR-binding peptide
  MOD_RES (20)..(21): Xaa is C or S
VKENEDIFLMSIPSLETPVXXAKPIK

SEQ ID NO: 8058 - protein, 16 aa, Artificial Sequence
  Cyclic GFR-binding peptide
VVNNASDYYVIPLPEL

SEQ ID NO: 8059 - protein, 15 aa, Artificial Sequence
  Cyclic GFR-binding peptide
IVNSSDDYYLVTLPE

SEQ ID NO: 8060 - protein, 19 aa, Artificial Sequence
  Cyclic GFR-binding peptide
VVNNASDLYLISIASLRTP

SEQ ID NO: 8061 - protein, 24 aa, Artificial Sequence
  Cyclic GFR-binding peptide
  MOD_RES (18)..(19): Xaa is C or S
DYEDYYVMPLPELETPVXXAKPIS

SEQ ID NO: 8062 - protein, 18 aa, Artificial Sequence
  Cyclic GFR-binding peptide
  MOD_RES (14)..(15): Xaa is C or S
YYLMTLPELETPVXXAKP

SEQ ID NO: 8063 - protein, 17 aa, Artificial Sequence
  Cyclic GFR-binding peptide
  MOD_RES (14)..(15): Xaa is C or S
IFLISIPSLAQPVXXPA

SEQ ID NO: 8064 - protein, 20 aa, Artificial Sequence
  Cyclic GFR-binding peptide
  MOD_RES (14)..(15): Xaa is C or S
YYVIPLPELDQPVXXPSASA

SEQ ID NO: 8065 - protein, 14 aa, Artificial Sequence
  Cyclic GFR-binding peptide
  MOD_RES (14)..(14): Xaa is C or S
FYLISIANLRTPVX

SEQ ID NO: 8066 - protein, 26 aa, Artificial Sequence
  Cyclic GFR-binding peptide
  MOD_RES (20)..(21): Xaa is C or S
VKDYEDYYVMPLPELETPVXXAKPIS

SEQ ID NO: 8067 - protein, 24 aa, Artificial Sequence
  Cyclic GFR-binding peptide
  MOD_RES (18)..(19): Xaa is C or S
TRGVIFLISIPSLDQPVXXPSASA

SEQ ID NO: 8068 - protein, 14 aa, Artificial Sequence
  Cyclic GFR-binding peptide
  MOD_RES (14)..(14): Xaa is C or S
LYLISIASLRTPVX

SEQ ID NO: 8069 - protein, 19 aa, Artificial Sequence
  Cyclic GFR-binding peptide
IVNSSDDIFLVSIPSLKTP

SEQ ID NO: 8070 - protein, 21 aa, Artificial Sequence
  Cyclic GFR-binding peptide
  MOD_RES (15)..(16): Xaa is C or S
VYYLITLPELAQPVXXPAASA

SEQ ID NO: 8071 - protein, 20 aa, Artificial Sequence
  Cyclic GFR-binding peptide
  MOD_RES (14)..(15): Xaa is C or S
YYVIPLPELRTPVXXTPPTS

SEQ ID NO: 8072 - protein, 23 aa, Artificial Sequence
  Cyclic GFR-binding peptide
  MOD_RES (17)..(18): Xaa is C or S
SDDYYLVTLPELQTPAXXPKPVT

SEQ ID NO: 8073 - protein, 26 aa, Artificial Sequence
  Cyclic GFR-binding peptide
  MOD_RES (20)..(21): Xaa is C or S
VKDYEDYYLMTLPELETPVXXAKPIS

SEQ ID NO: 8074 - protein, 19 aa, Artificial Sequence
  Cyclic GFR-binding peptide
IVNSSDDIFLVSIPSLQTP

SEQ ID NO: 8075 - protein, 24 aa, Artificial Sequence
  Cyclic GFR-binding peptide
  MOD_RES (18)..(19): Xaa is C or S
ENEDYYLMTLPELETPVXXAKPIK

SEQ ID NO: 8076 - protein, 21 aa, Artificial Sequence
  Cyclic GFR-binding peptide
  MOD_RES (15)..(16): Xaa is C or S
DIFLVSIPSLKTPAXXPKPVY

SEQ ID NO: 8077 - protein, 15 aa, Artificial Sequence
  Cyclic GFR-binding peptide
VVKENEDIFLMSIPS

SEQ ID NO: 8078 - protein, 23 aa, Artificial Sequence
  Cyclic GFR-binding peptide
  MOD_RES (17)..(18): Xaa is C or S
SDDYYLVTLPELKTPAXXPKPVY

SEQ ID NO: 8079 - protein, 26 aa, Artificial Sequence
  Cyclic GFR-binding peptide
  MOD_RES (20)..(21): Xaa is C or S
VNNASDLYLISIASLRTPVXXTPPTS

SEQ ID NO: 8080 - protein, 17 aa, Artificial Sequence
  Cyclic GFR-binding peptide
  MOD_RES (14)..(15): Xaa is C or S
YYVMPLPELETPVXXAK

SEQ ID NO: 8081 - protein, 26 aa, Artificial Sequence
  Cyclic GFR-binding peptide
  MOD_RES (20)..(21): Xaa is C or S
VNSSDDIFLVSIPSLQTPAXXPKPVT

SEQ ID NO: 8082 - protein, 15 aa, Artificial Sequence
  Cyclic GFR-binding peptide
  MOD_RES (14)..(15): Xaa is C or S
YYVVPLPELQTPAXX

SEQ ID NO: 8083 - protein, 27 aa, Artificial Sequence
  Cyclic GFR-binding peptide
  MOD_RES (21)..(22): Xaa is C or S
VKPKRGVYYLITLPELAQPVXXPAASA

SEQ ID NO: 8084 - protein, 19 aa, Artificial Sequence
  Cyclic GFR-binding peptide
  MOD_RES (14)..(15): Xaa is C or S
IFLISIPSLDQSVXXPSAS

SEQ ID NO: 8085 - protein, 16 aa, Artificial Sequence
  Cyclic GFR-binding peptide
VKPTRGVIFLISIPSL

SEQ ID NO: 8086 - protein, 27 aa, Artificial Sequence
  Cyclic GFR-binding peptide
  MOD_RES (21)..(22): Xaa is C or S
IVNSSDDYYVVPLPELQTPAXXPKPVT

SEQ ID NO: 8087 - protein, 20 aa, Artificial Sequence
  Cyclic GFR-binding peptide
  MOD_RES (14)..(15): Xaa is C or S
YYVVPLPELQTPAXXPKPVT

SEQ ID NO: 8088 - protein, 16 aa, Artificial Sequence
  Cyclic GFR-binding peptide
  MOD_RES (14)..(15): Xaa is C or S
YYVVPLPELQTPAXXP

SEQ ID NO: 8089 - protein, 25 aa, Artificial Sequence
  Cyclic GFR-binding peptide
  MOD_RES (19)..(20): Xaa is C or S
PKRGVYYLITLPELAQPVXXPAASA

SEQ ID NO: 8090 - protein, 16 aa, Artificial Sequence
  Cyclic GFR-binding peptide
IVNSSDDIFLVSIPSL

SEQ ID NO: 8091 - protein, 21 aa, Artificial Sequence
  Cyclic GFR-binding peptide
  MOD_RES (15)..(16): Xaa is C or S
DYYLVTLPELKTPAXXPKPVY

SEQ ID NO: 8092 - protein, 17 aa, Artificial Sequence
  Cyclic GFR-binding peptide
VKPKRGVYYLITLPELA

SEQ ID NO: 8093 - protein, 26 aa, Artificial Sequence
  Cyclic GFR-binding peptide
  MOD_RES (20)..(21): Xaa is C or S
VNSSDDYYVVPLPELKTPAXXPKPVY

SEQ ID NO: 8094 - protein, 22 aa, Artificial Sequence
  Cyclic GFR-binding peptide
  MOD_RES (16)..(17): Xaa is C or S
EDYYVMPLPELETPVXXAKPIS

SEQ ID NO: 8095 - protein, 24 aa, Artificial Sequence
  Cyclic GFR-binding peptide
  MOD_RES (18)..(19): Xaa is C or S
SSDDYYVVPLPELQTPAXXPKPVT

SEQ ID NO: 8096 - protein, 19 aa, Artificial Sequence
  Cyclic GFR-binding peptide
  MOD_RES (14)..(15): Xaa is C or S
YYVVPLPELQTPAXXPKPV

SEQ ID NO: 8097 - protein, 27 aa, Artificial Sequence
  Cyclic GFR-binding peptide
  MOD_RES (21)..(22): Xaa is C or S
VKPTRGVIFLISIPSLDQPVXXPSASA

SEQ ID NO: 8098 - protein, 15 aa, Artificial Sequence
  Cyclic GFR-binding peptide
  MOD_RES (14)..(15): Xaa is C or S
YYLVTLPELQTPAXX

SEQ ID NO: 8099 - protein, 26 aa, Artificial Sequence
  Cyclic GFR-binding peptide
  MOD_RES (20)..(20): Xaa is C or S
VNSSDDYYLVTLPELKTPAXTPKTVH

SEQ ID NO: 8100 - protein, 15 aa, Artificial Sequence
  Cyclic GFR-binding peptide
VKPKRGVYYLITLPE

SEQ ID NO: 8101 - protein, 18 aa, Artificial Sequence
  Cyclic GFR-binding peptide
  MOD_RES (14)..(15): Xaa is C or S
YYVIPLPELDQPVXXPSA

SEQ ID NO: 8102 - protein, 21 aa, Artificial Sequence
  Cyclic GFR-binding peptide
  MOD_RES (15)..(16): Xaa is C or S
DYYLITLPELRTPVXXTPPTS

SEQ ID NO: 8103 - protein, 24 aa, Artificial Sequence
  Cyclic GFR-binding peptide
  MOD_RES (18)..(19): Xaa is C or S
DYEDIFLMSIPSLETPVXXAKPIS

SEQ ID NO: 8104 - protein, 15 aa, Artificial Sequence
  Cyclic GFR-binding peptide
  MOD_RES (14)..(15): Xaa is C or S
LYLISIASLRTPVXX

SEQ ID NO: 8105 - protein, 21 aa, Artificial Sequence
  Cyclic GFR-binding peptide
  MOD_RES (15)..(15): Xaa is C or S
DIFLVSIPSLKTPAXTPKTVH

SEQ ID NO: 8106 - protein, 17 aa, Artificial Sequence
  Cyclic GFR-binding peptide
VVNNASDYYLITLPELR

SEQ ID NO: 8107 - protein, 24 aa, Artificial Sequence
  Cyclic GFR-binding peptide
  MOD_RES (18)..(19): Xaa is C or S
SSDDYYLVTLPELKTPAXXPKPVY

SEQ ID NO: 8108 - protein, 15 aa, Artificial Sequence
  Cyclic GFR-binding peptide
  MOD_RES (14)..(15): Xaa is C or S
FYLISIANLRTPVXX

SEQ ID NO: 8109 - protein, 22 aa, Artificial Sequence
  Cyclic GFR-binding peptide
  MOD_RES (16)..(17): Xaa is C or S
SDYYLITLPELRTPVXXTPPTS

SEQ ID NO: 8110 - protein, 25 aa, Artificial Sequence
  Cyclic GFR-binding peptide
  MOD_RES (19)..(19): Xaa is C or S
NSSDDYYVVPLPELKTPAXTPKTVH

SEQ ID NO: 8111 - protein, 15 aa, Artificial Sequence
  Cyclic GFR-binding peptide
IVNSSDDYYVVPLPE

SEQ ID NO: 8112 - protein, 20 aa, Artificial Sequence
  Cyclic GFR-binding peptide
  MOD_RES (14)..(15): Xaa is C or S
YYVMPLPELETPVXXAKPIK

SEQ ID NO: 8113 - protein, 27 aa, Artificial Sequence
  Cyclic GFR-binding peptide
  MOD_RES (21)..(21): Xaa is C or S
IVNSSDDYYLVTLPELKTPAXTPKTVH

SEQ ID NO: 8114 - protein, 21 aa, Artificial Sequence
  Cyclic GFR-binding peptide
  MOD_RES (15)..(15): Xaa is C or S
DYYVVPLPELKTPAXTPKTVH

SEQ ID NO: 8115 - protein, 23 aa, Artificial Sequence
  Cyclic GFR-binding peptide
  MOD_RES (17)..(18): Xaa is C or S
SDDIFLVSIPSLKTPAXXPKPVY

SEQ ID NO: 8116 - protein, 16 aa, Artificial Sequence
  Cyclic GFR-binding peptide
VVNNASDFYLISIANL

SEQ ID NO: 8117 - protein, 16 aa, Artificial Sequence
  Cyclic GFR-binding peptide
IKPTKGIYYVIPLPEL

SEQ ID NO: 8118 - protein, 15 aa, Artificial Sequence
  Cyclic GFR-binding peptide
  MOD_RES (14)..(15): Xaa is C or S
YYLVTLPELKTPAXX

SEQ ID NO: 8119 - protein, 25 aa, Artificial Sequence
  Cyclic GFR-binding peptide
  MOD_RES (19)..(19): Xaa is C or S
NSSDDIFLVSIPSLKTPAXTPKTVH

SEQ ID NO: 8120 - protein, 20 aa, Artificial Sequence
  Cyclic GFR-binding peptide
  MOD_RES (14)..(14): Xaa is C or S
YYLVTLPELKTPAXTPKTVH

SEQ ID NO: 8121 - protein, 26 aa, Artificial Sequence
  Cyclic GFR-binding peptide
  MOD_RES (20)..(21): Xaa is C or S
KPKRGVIFLISIPSLAQPVXXPAASA

SEQ ID NO: 8122 - protein, 14 aa, Artificial Sequence
  Cyclic GFR-binding peptide
  MOD_RES (14)..(14): Xaa is C or S
YYVVPLPELKTPAX

SEQ ID NO: 8123 - protein, 18 aa, Artificial Sequence
  Cyclic GFR-binding peptide
VVKDYEDYYLMTLPELET

SEQ ID NO: 8124 - protein, 16 aa, Artificial Sequence
  Cyclic GFR-binding peptide
  MOD_RES (14)..(15): Xaa is C or S
YYVIPLPELRTPVXXT

SEQ ID NO: 8125 - protein, 15 aa, Artificial Sequence
  Cyclic GFR-binding peptide
VVNNASDYYLITLPE

SEQ ID NO: 8126 - protein, 16 aa, Artificial Sequence
  Cyclic GFR-binding peptide
  MOD_RES (14)..(15): Xaa is C or S
YYLVTLPELQTPAXXP

SEQ ID NO: 8127 - protein, 17 aa, Artificial Sequence
  Cyclic GFR-binding peptide
IVNSSDDYYLVTLPELK

SEQ ID NO: 8128 - protein, 17 aa, Artificial Sequence
  Cyclic GFR-binding peptide
VVKDYEDYYVMPLPELE

SEQ ID NO: 8129 - protein, 19 aa, Artificial Sequence
  Cyclic GFR-binding peptide
  MOD_RES (14)..(14): Xaa is C or S
YYVVPLPELKTPAXTPKTV

SEQ ID NO: 8130 - protein, 25 aa, Artificial Sequence
  Cyclic GFR-binding peptide
  MOD_RES (19)..(20): Xaa is C or S
NNASDYYVIPLPELRTPVXXTPPTS

SEQ ID NO: 8131 - protein, 23 aa, Artificial Sequence
  Cyclic GFR-binding peptide
  MOD_RES (17)..(18): Xaa is C or S
SDDIFLVSIPSLQTPAXXPKPVT

SEQ ID NO: 8132 - protein, 17 aa, Artificial Sequence
  Cyclic GFR-binding peptide
IVNSSDDYYLVTLPELQ

SEQ ID NO: 8133 - protein, 27 aa, Artificial Sequence
  Cyclic GFR-binding peptide
  MOD_RES (21)..(22): Xaa is C or S
VVKDYEDYYLMTLPELETPVXXAKPIS

SEQ ID NO: 8134 - protein, 22 aa, Artificial Sequence
  Cyclic GFR-binding peptide
  MOD_RES (16)..(17): Xaa is C or S
DDIFLVSIPSLQTPAXXPKPVT

SEQ ID NO: 8135 - protein, 22 aa, Artificial Sequence
  Cyclic GFR-binding peptide
  MOD_RES (16)..(17): Xaa is C or S
GVIFLISIPSLDQPVXXPSASA

SEQ ID NO: 8136 - protein, 22 aa, Artificial Sequence
  Cyclic GFR-binding peptide
  MOD_RES (16)..(17): Xaa is C or S
DDIFLVSIPSLKTPAXXPKPVY

SEQ ID NO: 8137 - protein, 13 aa, Artificial Sequence
  Cyclic GFR-binding peptide
APTKLSPISVLFI

SEQ ID NO: 8138 - protein, 20 aa, Artificial Sequence
  Cyclic GFR-binding peptide
  MOD_RES (7)..(7): Xaa is C or S
HVTKPTXAPTKLSPISVLFI

SEQ ID NO: 8139 - protein, 27 aa, Artificial Sequence
  Cyclic GFR-binding peptide
  MOD_RES (6)..(7): Xaa is C or S
SIPKAXXVPTELEPLPMVYYDEYDKVV

SEQ ID NO: 8140 - protein, 23 aa, Artificial Sequence
  Cyclic GFR-binding peptide
  MOD_RES (6)..(7): Xaa is C or S
YVPKPXXAPTKLEPLPVVYYDDS

SEQ ID NO: 8141 - protein, 24 aa, Artificial Sequence
  Cyclic GFR-binding peptide
  MOD_RES (6)..(7): Xaa is C or S
STPPTXXVPTRLSAISILYLDSAN

SEQ ID NO: 8142 - protein, 26 aa, Artificial Sequence
  Cyclic GFR-binding peptide
  MOD_RES (6)..(7): Xaa is C or S
YVPKPXXAPTKLSPISVLFIDDSSNV

SEQ ID NO: 8143 - protein, 19 aa, Artificial Sequence
  Cyclic GFR-binding peptide
  MOD_RES (5)..(6): Xaa is C or S
VPKPXXAPTKLEPLTVLYY

SEQ ID NO: 8144 - protein, 15 aa, Artificial Sequence
  Cyclic GFR-binding peptide
SPISILFIVGRTPKV

SEQ ID NO: 8145 - protein, 24 aa, Artificial Sequence
  Cyclic GFR-binding peptide
  MOD_RES (6)..(7): Xaa is C or S
YVPKPXXAPTKLSPISVLFIDDSS

SEQ ID NO: 8146 - protein, 26 aa, Artificial Sequence
  Cyclic GFR-binding peptide
  MOD_RES (7)..(7): Xaa is C or S
HVTKPTXAPTKLSPISVLFIDDSSNV

SEQ ID NO: 8147 - protein, 20 aa, Artificial Sequence
  Cyclic GFR-binding peptide
  MOD_RES (6)..(7): Xaa is C or S
SIPKAXXVPTELSPISMLFI

SEQ ID NO: 8148 - protein, 19 aa, Artificial Sequence
  Cyclic GFR-binding peptide
  MOD_RES (5)..(6): Xaa is C or S
VPKPXXAPTKLEPLPVVYY

SEQ ID NO: 8149 - protein, 26 aa, Artificial Sequence
  Cyclic GFR-binding peptide
  MOD_RES (6)..(7): Xaa is C or S
TVPKPXXAPTQLEPLTVLYYDDSSNV

SEQ ID NO: 8150 - protein, 23 aa, Artificial Sequence
  Cyclic GFR-binding peptide
  MOD_RES (6)..(7): Xaa is C or S
ASASPXXVSQDLSPISILFIIGK

SEQ ID NO: 8151 - protein, 16 aa, Artificial Sequence
  Cyclic GFR-binding peptide
  MOD_RES (2)..(3): Xaa is C or S
PXXVPQDLEPLPIVYY

SEQ ID NO: 8152 - protein, 20 aa, Artificial Sequence
  Cyclic GFR-binding peptide
  MOD_RES (6)..(7): Xaa is C or S
ASASPXXVSQDLEPLPIVYY

SEQ ID NO: 8153 - protein, 20 aa, Artificial Sequence
  Cyclic GFR-binding peptide
  MOD_RES (6)..(7): Xaa is C or S
STPPTXXVPTRLSAISILYL

SEQ ID NO: 8154 - protein, 17 aa, Artificial Sequence
  Cyclic GFR-binding peptide
DLEPLPIVYYVGRTPKV

SEQ ID NO: 8155 - protein, 16 aa, Artificial Sequence
  Cyclic GFR-binding peptide
LSPISILFIIGKTPKI

SEQ ID NO: 8156 - protein, 18 aa, Artificial Sequence
  Cyclic GFR-binding peptide
TELSPISMLFIDENEKVV

SEQ ID NO: 8157 - protein, 15 aa, Artificial Sequence
  Cyclic GFR-binding peptide
NAISILYFDSANNVV

SEQ ID NO: 8158 - protein, 19 aa, Artificial Sequence
  Cyclic GFR-binding peptide
PTKLEPLPVVYYDDSSNVI

SEQ ID NO: 8159 - protein, 14 aa, Artificial Sequence
  Cyclic GFR-binding peptide
  MOD_RES (1)..(1): Xaa is C or S
XVPTRLEPLPIVYY

SEQ ID NO: 8160 - protein, 19 aa, Artificial Sequence
  Cyclic GFR-binding peptide
PTQLEPLPVVYYDDSSNVI

SEQ ID NO: 8161 - protein, 15 aa, Artificial Sequence
  Cyclic GFR-binding peptide
SAISILYLDSANNVV

SEQ ID NO: 8162 - protein, 20 aa, Artificial Sequence
  Cyclic GFR-binding peptide
  MOD_RES (6)..(7): Xaa is C or S
KIPKAXXVPTELEPLTMLYY

SEQ ID NO: 8163 - protein, 15 aa, Artificial Sequence
  Cyclic GFR-binding peptide
EPLTMLYYDEYDKVV

SEQ ID NO: 8164 - protein, 15 aa, Artificial Sequence
  Cyclic GFR-binding peptide
  MOD_RES (1)..(2): Xaa is C or S
XXAPTKLEPLPVVYY

SEQ ID NO: 8165 - protein, 15 aa, Artificial Sequence
  Cyclic GFR-binding peptide
  MOD_RES (2)..(2): Xaa is C or S
TXAPTKLSPISVLFI

SEQ ID NO: 8166 - protein, 24 aa, Artificial Sequence
  Cyclic GFR-binding peptide
  MOD_RES (6)..(7): Xaa is C or S
ASAAPXXVPQALSPISILFIVGRK

SEQ ID NO: 8167 - protein, 13 aa, Artificial Sequence
  Cyclic GFR-binding peptide
APTKLEPLPVVYY

SEQ ID NO: 8168 - protein, 20 aa, Artificial Sequence
  Cyclic GFR-binding peptide
  MOD_RES (6)..(7): Xaa is C or S
SIPKAXXVPTELEPLPMVYY

SEQ ID NO: 8169 - protein, 27 aa, Artificial Sequence
  Cyclic GFR-binding peptide
  MOD_RES (6)..(7): Xaa is C or S
TVPKPXXAPTQLSPISVLFIDDSSNVI

SEQ ID NO: 8170 - protein, 14 aa, Artificial Sequence
  Cyclic GFR-binding peptide
  MOD_RES (1)..(1): Xaa is C or S
XVPTRLEPLTILYY

SEQ ID NO: 8171 - protein, 18 aa, Artificial Sequence
  Cyclic GFR-binding peptide
TRLNAISILYFDSANNVV

SEQ ID NO: 8172 - protein, 14 aa, Artificial Sequence
  Cyclic GFR-binding peptide
  MOD_RES (1)..(1): Xaa is C or S
XAPTKLEPLTVLYY

SEQ ID NO: 8173 - protein, 19 aa, Artificial Sequence
  Cyclic GFR-binding peptide
PQALEPLTILYYVGRKPKV

SEQ ID NO: 8174 - protein, 19 aa, Artificial Sequence
  Cyclic GFR-binding peptide
  MOD_RES (6)..(6): Xaa is C or S
VTKPTXAPTKLEPLTVLYY

SEQ ID NO: 8175 - protein, 15 aa, Artificial Sequence
  Cyclic GFR-binding peptide
  MOD_RES (2)..(2): Xaa is C or S
TXAPTKLEPLPVVYY

SEQ ID NO: 8176 - protein, 24 aa, Artificial Sequence
  Cyclic GFR-binding peptide
  MOD_RES (7)..(7): Xaa is C or S
HVTKPTXAPTKLEPLTVLYYDDSS

SEQ ID NO: 8177 - protein, 22 aa, Artificial Sequence
  Cyclic GFR-binding peptide
  MOD_RES (6)..(7): Xaa is C or S
ASAAPXXVPQALEPLTILYYVG

SEQ ID NO: 8178 - protein, 20 aa, Artificial Sequence
  Cyclic GFR-binding peptide
  MOD_RES (6)..(7): Xaa is C or S
ASASPXXVSQDLSPISILFI

SEQ ID NO: 8179 - protein, 18 aa, Artificial Sequence
  Cyclic GFR-binding peptide
QALEPLTILYYVGRKPKV

SEQ ID NO: 8180 - protein, 22 aa, Artificial Sequence
  Cyclic GFR-binding peptide
  MOD_RES (6)..(7): Xaa is C or S
KIPKAXXVPTELEPLPMVYYDE

SEQ ID NO: 8181 - protein, 18 aa, Artificial Sequence
  Cyclic GFR-binding peptide
  MOD_RES (4)..(5): Xaa is C or S
ASPXXVPQDLSPISILFI

SEQ ID NO: 8182 - protein, 20 aa, Artificial Sequence
  Cyclic GFR-binding peptide
  MOD_RES (7)..(7): Xaa is C or S
HVTKPTXAPTKLEPLPVVYY

SEQ ID NO: 8183 - protein, 16 aa, Artificial Sequence
  Cyclic GFR-binding peptide
LSPISILFIVGRKPKV

SEQ ID NO: 8184 - protein, 26 aa, Artificial Sequence
  Cyclic GFR-binding peptide
  MOD_RES (6)..(7): Xaa is C or S
KIPKAXXVPTELEPLPMVYYDENEKV

SEQ ID NO: 8185 - protein, 23 aa, Artificial Sequence
  Cyclic GFR-binding peptide
  MOD_RES (6)..(7): Xaa is C or S
ASASPXXVPQDLSPISILFIVGR

SEQ ID NO: 8186 - protein, 16 aa, Artificial Sequence
  Cyclic GFR-binding peptide
  MOD_RES (2)..(3): Xaa is C or S
PXXVPQDLSPISILFI

SEQ ID NO: 8187 - protein, 22 aa, Artificial Sequence
  Cyclic GFR-binding peptide
  MOD_RES (6)..(7): Xaa is C or S
STPPTXXVPTRLEPLPIVYYDS

SEQ ID NO: 8188 - protein, 17 aa, Artificial Sequence
  Cyclic GFR-binding peptide
  MOD_RES (3)..(4): Xaa is C or S
KAXXVPTELEPLTMLYY

SEQ ID NO: 8189 - protein, 19 aa, Artificial Sequence
  Cyclic GFR-binding peptide
SQDLSPISILFIIGKTPKI

SEQ ID NO: 8190 - protein, 22 aa, Artificial Sequence
  Cyclic GFR-binding peptide
  MOD_RES (7)..(7): Xaa is C or S
HVTKPTXAPTKLEPLPVVYYDD

SEQ ID NO: 8191 - protein, 25 aa, Artificial Sequence
  Cyclic GFR-binding peptide
  MOD_RES (6)..(7): Xaa is C or S
KIPKAXXVPTELEPLTMLYYDENEK

SEQ ID NO: 8192 - protein, 18 aa, Artificial Sequence
  Cyclic GFR-binding peptide
  MOD_RES (4)..(5): Xaa is C or S
AAPXXVPQALSPISILFI

SEQ ID NO: 8193 - protein, 16 aa, Artificial Sequence
  Cyclic GFR-binding peptide
LSAISILYLDSANNVV

SEQ ID NO: 8194 - protein, 21 aa, Artificial Sequence
  Cyclic GFR-binding peptide
  MOD_RES (6)..(7): Xaa is C or S
YVPKPXXAPTKLEPLPVVYYD

SEQ ID NO: 8195 - protein, 16 aa, Artificial Sequence
  Cyclic GFR-binding peptide
LEPLTMLYYDEYDKVV

SEQ ID NO: 8196 - protein, 25 aa, Artificial Sequence
  Cyclic GFR-binding peptide
  MOD_RES (6)..(7): Xaa is C or S
STPPTXXVPTRLNAISILYFDSANN

SEQ ID NO: 8197 - protein, 25 aa, Artificial Sequence
  Cyclic GFR-binding peptide
  MOD_RES (6)..(7): Xaa is C or S
KIPKAXXVPTELEPLPMVYYDENEK

SEQ ID NO: 8198 - protein, 17 aa, Artificial Sequence
  Cyclic GFR-binding peptide
QLEPLPVVYYDDSSNVI

SEQ ID NO: 8199 - protein, 17 aa, Artificial Sequence
  Cyclic GFR-binding peptide
DLEPLPIVYYIGKTPKI

SEQ ID NO: 8200 - protein, 27 aa, Artificial Sequence
  Cyclic GFR-binding peptide
  MOD_RES (6)..(7): Xaa is C or S
ASAAPXXVPQALSPISILFIVGRKPKV

SEQ ID NO: 8201 - protein, 17 aa, Artificial Sequence
  Cyclic GFR-binding peptide
KLEPLPVVYYDDSSNVI

SEQ ID NO: 8202 - protein, 23 aa, Artificial Sequence
  Cyclic GFR-binding peptide
  MOD_RES (6)..(7): Xaa is C or S
STPPTXXVPTRLEPLPIVYYDSA

SEQ ID NO: 8203 - protein, 15 aa, Artificial Sequence
  Cyclic GFR-binding peptide
EPLPIVYYIGKTPKI

SEQ ID NO: 8204 - protein, 27 aa, Artificial Sequence
  Cyclic GFR-binding peptide
  MOD_RES (6)..(7): Xaa is C or S
STPPTXXVPTRLEPLPIVYYDSANNVV

SEQ ID NO: 8205 - protein, 21 aa, Artificial Sequence
  Cyclic GFR-binding peptide
  MOD_RES (6)..(7): Xaa is C or S
TVPKPXXAPTQLEPLPVVYYD

SEQ ID NO: 8206 - protein, 15 aa, Artificial Sequence
  Cyclic GFR-binding peptide
  MOD_RES (1)..(2): Xaa is C or S
XXVPTRLEPLPIVYY

SEQ ID NO: 8207 - protein, 24 aa, Artificial Sequence
  Cyclic GFR-binding peptide
  MOD_RES (6)..(7): Xaa is C or S
STPPTXXVPTRLEPLPIVYYDSAN

SEQ ID NO: 8208 - protein, 19 aa, Artificial Sequence
  Cyclic GFR-binding peptide
PTELEPLTMLYYDEYDKVV

SEQ ID NO: 8209 - protein, 24 aa, Artificial Sequence
  Cyclic GFR-binding peptide
  MOD_RES (6)..(7): Xaa is C or S
ASASPXXVPQDLEPLPIVYYVGRT

SEQ ID NO: 8210 - protein, 25 aa, Artificial Sequence
  Cyclic GFR-binding peptide
  MOD_RES (6)..(7): Xaa is C or S
ASASPXXVPQDLSPISILFIVGRTP

SEQ ID NO: 8211 - protein, 27 aa, Artificial Sequence
  Cyclic GFR-binding peptide
  MOD_RES (6)..(7): Xaa is C or S
KIPKAXXVPTELEPLTMLYYDENEKVV

SEQ ID NO: 8212 - protein, 16 aa, Artificial Sequence
  Cyclic GFR-binding peptide
  MOD_RES (2)..(3): Xaa is C or S
PXXVSQDLEPLPIVYY

SEQ ID NO: 8213 - protein, 20 aa, Artificial Sequence
  Cyclic GFR-binding peptide
  MOD_RES (6)..(7): Xaa is C or S
SIPKAXXVPTELEPLTMLYY

SEQ ID NO: 8214 - protein, 22 aa, Artificial Sequence
  Cyclic GFR-binding peptide
  MOD_RES (6)..(7): Xaa is C or S
KIPKAXXVPTELEPLTMLYYDE

SEQ ID NO: 8215 - protein, 25 aa, Artificial Sequence
  Cyclic GFR-binding peptide
  MOD_RES (6)..(7): Xaa is C or S
TVPKPXXAPTQLEPLTVLYYDDSSN

SEQ ID NO: 8216 - protein, 18 aa, Artificial Sequence
  Cyclic GFR-binding peptide
QDLEPLPIVYYVGRTPKV

SEQ ID NO: 8217 - protein, 27 aa, Artificial Sequence
  Cyclic GFR-binding peptide
  MOD_RES (6)..(7): Xaa is C or S
YVPKPXXAPTKLSPISVLFIDDSSNVI

SEQ ID NO: 8218 - protein, 14 aa, Artificial Sequence
  Cyclic GFR-binding peptide
  MOD_RES (1)..(1): Xaa is C or S
XAPTKLSPISVLFI

SEQ ID NO: 8219 - protein, 27 aa, Artificial Sequence
  Cyclic GFR-binding peptide
  MOD_RES (7)..(7): Xaa is C or S
HVTKPTXAPTKLEPLPVVYYDDSSNVI

SEQ ID NO: 8220 - protein, 26 aa, Artificial Sequence
  Cyclic GFR-binding peptide
  MOD_RES (6)..(7): Xaa is C or S
YVPKPXXAPTKLEPLTVLYYDDSSNV

SEQ ID NO: 8221 - protein, 15 aa, Artificial Sequence
  Cyclic GFR-binding peptide
  MOD_RES (1)..(2): Xaa is C or S
XXVPTRLEPLTILYY

SEQ ID NO: 8222 - protein, 16 aa, Artificial Sequence
  Cyclic GFR-binding peptide
  MOD_RES (2)..(3): Xaa is C or S
PXXAPTQLSPISVLFI

SEQ ID NO: 8223 - protein, 19 aa, Artificial Sequence
  Cyclic GFR-binding peptide
  MOD_RES (5)..(6): Xaa is C or S
VPKPXXAPTKLSPISVLFI

SEQ ID NO: 8224 - protein, 24 aa, Artificial Sequence
  Cyclic GFR-binding peptide
  MOD_RES (6)..(7): Xaa is C or S
KIPKAXXVPTELEPLPMVYYDENE

SEQ ID NO: 8225 - protein, 16 aa, Artificial Sequence
  Cyclic GFR-binding peptide
LEPLPVVYYDDSSNVI

SEQ ID NO: 8226 - protein, 26 aa, Artificial Sequence
  Cyclic GFR-binding peptide
  MOD_RES (6)..(7): Xaa is C or S
STPPTXXVPTRLEPLPIVYYDSANNV

SEQ ID NO: 8227 - protein, 25 aa, Artificial Sequence
  Cyclic GFR-binding peptide
  MOD_RES (6)..(7): Xaa is C or S
STPPTXXVPTRLSAISILYLDSANN

SEQ ID NO: 8228 - protein, 19 aa, Artificial Sequence
  Cyclic GFR-binding peptide
  MOD_RES (5)..(6): Xaa is C or S
TPPTXXVPTRLEPLPIVYY

SEQ ID NO: 8229 - protein, 23 aa, Artificial Sequence
  Cyclic GFR-binding peptide
  MOD_RES (6)..(7): Xaa is C or S
SIPKAXXVPTELEPLTMLYYDEY

SEQ ID NO: 8230 - protein, 23 aa, Artificial Sequence
  Cyclic GFR-binding peptide
  MOD_RES (6)..(7): Xaa is C or S
ASASPXXVSQDLEPLPIVYYIGK

SEQ ID NO: 8231 - protein, 17 aa, Artificial Sequence
  Cyclic GFR-binding peptide
ELEPLTMLYYDEYDKVV

SEQ ID NO: 8232 - protein, 15 aa, Artificial Sequence
  Cyclic GFR-binding peptide
  MOD_RES (1)..(2): Xaa is C or S
XXAPTKLSPISVLFI

SEQ ID NO: 8233 - protein, 23 aa, Artificial Sequence
  Cyclic GFR-binding peptide
  MOD_RES (6)..(7): Xaa is C or S
SIPKAXXVPTELEPLPMVYYDEY

SEQ ID NO: 8234 - protein, 21 aa, Artificial Sequence
  Cyclic GFR-binding peptide
  MOD_RES (6)..(7): Xaa is C or S
ASASPXXVPQDLEPLPIVYYV

SEQ ID NO: 8235 - protein, 19 aa, Artificial Sequence
  Cyclic GFR-binding peptide
PTRLNAISILYFDSANNVV

SEQ ID NO: 8236 - protein, 18 aa, Artificial Sequence
  Cyclic GFR-binding peptide
  MOD_RES (4)..(5): Xaa is C or S
PKPXXAPTKLSPISVLFI

SEQ ID NO: 8237 - protein, 22 aa, Artificial Sequence
  Cyclic GFR-binding peptide
  MOD_RES (6)..(7): Xaa is C or S
ASASPXXVSQDLEPLPIVYYIG

SEQ ID NO: 8238 - protein, 22 aa, Artificial Sequence
  Cyclic GFR-binding peptide
  MOD_RES (7)..(7): Xaa is C or S
HVTKPTXAPTKLSPISVLFIDD

SEQ ID NO: 8239 - protein, 18 aa, Artificial Sequence
  Cyclic GFR-binding peptide
  MOD_RES (4)..(5): Xaa is C or S
PKPXXAPTQLSPISVLFI

SEQ ID NO: 8240 - protein, 18 aa, Artificial Sequence
  Cyclic GFR-binding peptide
TRLSAISILYLDSANNVV

SEQ ID NO: 8241 - protein, 19 aa, Artificial Sequence
  Cyclic GFR-binding peptide
  MOD_RES (6)..(6): Xaa is C or S
VTKPTXAPTKLSPISVLFI

SEQ ID NO: 8242 - protein, 15 aa, Artificial Sequence
  Cyclic GFR-binding peptide
EPLPIVYYDSANNVV

SEQ ID NO: 8243 - protein, 21 aa, Artificial Sequence
  Cyclic GFR-binding peptide
  MOD_RES (6)..(7): Xaa is C or S
KIPKAXXVPTELSPISMLFID

SEQ ID NO: 8244 - protein, 18 aa, Artificial Sequence
  Cyclic GFR-binding peptide
TQLEPLTVLYYDDSSNVI

SEQ ID NO: 8245 - protein, 22 aa, Artificial Sequence
  Cyclic GFR-binding peptide
  MOD_RES (6)..(7): Xaa is C or S
YVPKPXXAPTKLEPLTVLYYDD

SEQ ID NO: 8246 - protein, 19 aa, Artificial Sequence
  Cyclic GFR-binding peptide
PTELSPISMLFIDENEKVV

SEQ ID NO: 8247 - protein, 24 aa, Artificial Sequence
  Cyclic GFR-binding peptide
  MOD_RES (6)..(7): Xaa is C or S
TVPKPXXAPTQLSPISVLFIDDSS

SEQ ID NO: 8248 - protein, 23 aa, Artificial Sequence
  Cyclic GFR-binding peptide
  MOD_RES (6)..(7): Xaa is C or S
ASASPXXVPQDLEPLPIVYYVGR

SEQ ID NO: 8249 - protein, 18 aa, Artificial Sequence
  Cyclic GFR-binding peptide
TKLEPLTVLYYDDSSNVI

SEQ ID NO: 8250 - protein, 21 aa, Artificial Sequence
  Cyclic GFR-binding peptide
  MOD_RES (6)..(7): Xaa is C or S
SIPKAXXVPTELEPLPMVYYD

SEQ ID NO: 8251 - protein, 13 aa, Artificial Sequence
  Cyclic GFR-binding peptide
VPTRLEPLPIVYY

SEQ ID NO: 8252 - protein, 20 aa, Artificial Sequence
  Cyclic GFR-binding peptide
  MOD_RES (6)..(7): Xaa is C or S
KIPKAXXVPTELSPISMLFI

SEQ ID NO: 8253 - protein, 15 aa, Artificial Sequence
  Cyclic GFR-binding peptide
  MOD_RES (2)..(2): Xaa is C or S
TXAPTKLEPLTVLYY

SEQ ID NO: 8254 - protein, 25 aa, Artificial Sequence
  Cyclic GFR-binding peptide
  MOD_RES (6)..(7): Xaa is C or S
YVPKPXXAPTKLEPLPVVYYDDSSN

SEQ ID NO: 8255 - protein, 24 aa, Artificial Sequence
  Cyclic GFR-binding peptide
  MOD_RES (6)..(7): Xaa is C or S
STPPTXXVPTRLNAISILYFDSAN

SEQ ID NO: 8256 - protein, 18 aa, Artificial Sequence
  Cyclic GFR-binding peptide
  MOD_RES (4)..(5): Xaa is C or S
ASPXXVSQDLSPISILFI

SEQ ID NO: 8257 - protein, 22 aa, Artificial Sequence
  Cyclic GFR-binding peptide
  MOD_RES (6)..(7): Xaa is C or S
ASASPXXVPQDLEPLPIVYYVG

SEQ ID NO: 8258 - protein, 17 aa, Artificial Sequence
  Cyclic GFR-binding peptide
ELSPISMLFIDENEKVV

SEQ ID NO: 8259 - protein, 19 aa, Artificial Sequence
  Cyclic GFR-binding peptide
SQDLEPLPIVYYIGKTPKI

SEQ ID NO: 8260 - protein, 18 aa, Artificial Sequence
  Cyclic GFR-binding peptide
  MOD_RES (4)..(5): Xaa is C or S
PKPXXAPTKLEPLTVLYY

SEQ ID NO: 8261 - protein, 18 aa, Artificial Sequence
  Cyclic GFR-binding peptide
TELEPLPMVYYDENEKVV

SEQ ID NO: 8262 - protein, 21 aa, Artificial Sequence
  Cyclic GFR-binding peptide
  MOD_RES (6)..(7): Xaa is C or S
TVPKPXXAPTQLSPISVLFID

SEQ ID NO: 8263 - protein, 20 aa, Artificial Sequence
  Cyclic GFR-binding peptide
  MOD_RES (6)..(7): Xaa is C or S
ASAAPXXVPQALSPISILFI

SEQ ID NO: 8264 - protein, 25 aa, Artificial Sequence
  Cyclic GFR-binding peptide
  MOD_RES (6)..(7): Xaa is C or S
ASASPXXVSQDLEPLPIVYYIGKTP

SEQ ID NO: 8265 - protein, 21 aa, Artificial Sequence
  Cyclic GFR-binding peptide
  MOD_RES (6)..(7): Xaa is C or S
ASAAPXXVPQALSPISILFIV

SEQ ID NO: 8266 - protein, 23 aa, Artificial Sequence
  Cyclic GFR-binding peptide
  MOD_RES (6)..(7): Xaa is C or S
STPPTXXVPTRLNAISILYFDSA

SEQ ID NO: 8267 - protein, 22 aa, Artificial Sequence
  Cyclic GFR-binding peptide
  MOD_RES (6)..(7): Xaa is C or S
SIPKAXXVPTELEPLTMLYYDE

SEQ ID NO: 8268 - protein, 13 aa, Artificial Sequence
  Cyclic GFR-binding peptide
APTQLEPLTVLYY

SEQ ID NO: 8269 - protein, 18 aa, Artificial Sequence
  Cyclic GFR-binding peptide
TELSPISMLFIDEYDKVV

SEQ ID NO: 8270 - protein, 21 aa, Artificial Sequence
  Cyclic GFR-binding peptide
  MOD_RES (6)..(7): Xaa is C or S
KIPKAXXVPTELEPLPMVYYD

SEQ ID NO: 8271 - protein, 18 aa, Artificial Sequence
  Cyclic GFR-binding peptide
  MOD_RES (4)..(5): Xaa is C or S
PPTXXVPTRLEPLTILYY

SEQ ID NO: 8272 - protein, 18 aa, Artificial Sequence
  Cyclic GFR-binding peptide
  MOD_RES (4)..(5): Xaa is C or S
PKPXXAPTKLEPLPVVYY

SEQ ID NO: 8273 - protein, 13 aa, Artificial Sequence
  Cyclic GFR-binding peptide
VPTRLEPLTILYY

SEQ ID NO: 8274 - protein, 20 aa, Artificial Sequence
  Cyclic GFR-binding peptide
  MOD_RES (6)..(7): Xaa is C or S
ASASPXXVPQDLSPISILFI

SEQ ID NO: 8275 - protein, 17 aa, Artificial Sequence
  Cyclic GFR-binding peptide
  MOD_RES (3)..(4): Xaa is C or S
KPXXAPTKLSPISVLFI

SEQ ID NO: 8276 - protein, 21 aa, Artificial Sequence
  Cyclic GFR-binding peptide
  MOD_RES (6)..(7): Xaa is C or S
SIPKAXXVPTELSPISMLFID

SEQ ID NO: 8277 - protein, 19 aa, Artificial Sequence
  Cyclic GFR-binding peptide
PTELEPLPMVYYDEYDKVV

SEQ ID NO: 8278 - protein, 26 aa, Artificial Sequence
  Cyclic GFR-binding peptide
  MOD_RES (6)..(7): Xaa is C or S
ASASPXXVPQDLEPLPIVYYVGRTPK

SEQ ID NO: 8279 - protein, 27 aa, Artificial Sequence
  Cyclic GFR-binding peptide
  MOD_RES (6)..(7): Xaa is C or S
ASASPXXVSQDLEPLPIVYYIGKTPKI

SEQ ID NO: 8280 - protein, 25 aa, Artificial Sequence
  Cyclic GFR-binding peptide
  MOD_RES (6)..(7): Xaa is C or S
KIPKAXXVPTELSPISMLFIDENEK

SEQ ID NO: 8281 - protein, 16 aa, Artificial Sequence
  Cyclic GFR-binding peptide
  MOD_RES (2)..(3): Xaa is C or S
PXXVPQALEPLTILYY

SEQ ID NO: 8282 - protein, 21 aa, Artificial Sequence
  Cyclic GFR-binding peptide
  MOD_RES (6)..(7): Xaa is C or S
STPPTXXVPTRLEPLPIVYYD

SEQ ID NO: 8283 - protein, 21 aa, Artificial Sequence
  Cyclic GFR-binding peptide
  MOD_RES (6)..(7): Xaa is C or S
ASASPXXVSQDLEPLPIVYYI

SEQ ID NO: 8284 - protein, 17 aa, Artificial Sequence
  Cyclic GFR-binding peptide
QLSPISVLFIDDSSNVI

SEQ ID NO: 8285 - protein, 17 aa, Artificial Sequence
  Cyclic GFR-binding peptide
KLSPISVLFIDDSSNVI

SEQ ID NO: 8286 - protein, 22 aa, Artificial Sequence
  Cyclic GFR-binding peptide
  MOD_RES (6)..(7): Xaa is C or S
SIPKAXXVPTELSPISMLFIDE

SEQ ID NO: 8287 - protein, 27 aa, Artificial Sequence
  Cyclic GFR-binding peptide
  MOD_RES (6)..(7): Xaa is C or S
SIPKAXXVPTELSPISMLFIDEYDKVV

SEQ ID NO: 8288 - protein, 21 aa, Artificial Sequence
  Cyclic GFR-binding peptide
  MOD_RES (6)..(7): Xaa is C or S
STPPTXXVPTRLSAISILYLD

SEQ ID NO: 8289 - protein, 17 aa, Artificial Sequence
  Cyclic GFR-binding peptide
  MOD_RES (3)..(4): Xaa is C or S
KAXXVPTELSPISMLFI

SEQ ID NO: 8290 - protein, 16 aa, Artificial Sequence
  Cyclic GFR-binding peptide
LEPLTMLYYDENEKVV

SEQ ID NO: 8291 - protein, 17 aa, Artificial Sequence
  Cyclic GFR-binding peptide
  MOD_RES (3)..(4): Xaa is C or S
KPXXAPTKLEPLPVVYY

SEQ ID NO: 8292 - protein, 24 aa, Artificial Sequence
  Cyclic GFR-binding peptide
  MOD_RES (7)..(7): Xaa is C or S
HVTKPTXAPTKLEPLPVVYYDDSS

SEQ ID NO: 8293 - protein, 22 aa, Artificial Sequence
  Cyclic GFR-binding peptide
  MOD_RES (6)..(7): Xaa is C or S
YVPKPXXAPTKLEPLPVVYYDD

SEQ ID NO: 8294 - protein, 19 aa, Artificial Sequence
  Cyclic GFR-binding peptide
  MOD_RES (5)..(6): Xaa is C or S
TPPTXXVPTRLEPLTILYY

SEQ ID NO: 8295 - protein, 23 aa, Artificial Sequence
  Cyclic GFR-binding peptide
  MOD_RES (6)..(7): Xaa is C or S
ASAAPXXVPQALSPISILFIVGR

SEQ ID NO: 8296 - protein, 25 aa, Artificial Sequence
  Cyclic GFR-binding peptide
  MOD_RES (6)..(7): Xaa is C or S
ASASPXXVPQDLEPLPIVYYVGRTP

SEQ ID NO: 8297 - protein, 18 aa, Artificial Sequence
  Cyclic GFR-binding peptide
  MOD_RES (4)..(5): Xaa is C or S
PKAXXVPTELSPISMLFI

SEQ ID NO: 8298 - protein, 22 aa, Artificial Sequence
  Cyclic GFR-binding peptide
  MOD_RES (6)..(7): Xaa is C or S
ASAAPXXVPQALSPISILFIVG

SEQ ID NO: 8299 - protein, 18 aa, Artificial Sequence
  Cyclic GFR-binding peptide
  MOD_RES (4)..(5): Xaa is C or S
PPTXXVPTRLNAISILYF

SEQ ID NO: 8300 - protein, 27 aa, Artificial Sequence
  Cyclic GFR-binding peptide
  MOD_RES (6)..(7): Xaa is C or S
YVPKPXXAPTKLEPLPVVYYDDSSNVI

SEQ ID NO: 8301 - protein, 22 aa, Artificial Sequence
  Cyclic GFR-binding peptide
  MOD_RES (7)..(7): Xaa is C or S
HVTKPTXAPTKLEPLTVLYYDD

SEQ ID NO: 8302 - protein, 17 aa, Artificial Sequence
  Cyclic GFR-binding peptide
  MOD_RES (3)..(4): Xaa is C or S
KPXXAPTKLEPLTVLYY

SEQ ID NO: 8303 - protein, 23 aa, Artificial Sequence
  Cyclic GFR-binding peptide
  MOD_RES (6)..(7): Xaa is C or S
KIPKAXXVPTELEPLPMVYYDEN

SEQ ID NO: 8304 - protein, 24 aa, Artificial Sequence
  Cyclic GFR-binding peptide
  MOD_RES (6)..(7): Xaa is C or S
YVPKPXXAPTKLEPLPVVYYDDSS

SEQ ID NO: 8305 - protein, 22 aa, Artificial Sequence
  Cyclic GFR-binding peptide
  MOD_RES (6)..(7): Xaa is C or S
TVPKPXXAPTQLEPLPVVYYDD

SEQ ID NO: 8306 - protein, 20 aa, Artificial Sequence
  Cyclic GFR-binding peptide
  MOD_RES (6)..(7): Xaa is C or S
ASAAPXXVPQALEPLTILYY

SEQ ID NO: 8307 - protein, 14 aa, Artificial Sequence
  Cyclic GFR-binding peptide
  MOD_RES (1)..(1): Xaa is C or S
XVPQDLEPLPIVYY

SEQ ID NO: 8308 - protein, 17 aa, Artificial Sequence
  Cyclic GFR-binding peptide
RLSAISILYLDSANNVV

SEQ ID NO: 8309 - protein, 18 aa, Artificial Sequence
  Cyclic GFR-binding peptide
  MOD_RES (4)..(5): Xaa is C or S
PKPXXAPTQLEPLTVLYY

SEQ ID NO: 8310 - protein, 15 aa, Artificial Sequence
  Cyclic GFR-binding peptide
  MOD_RES (1)..(2): Xaa is C or S
XXVPTELSPISMLFI

SEQ ID NO: 8311 - protein, 22 aa, Artificial Sequence
  Cyclic GFR-binding peptide
  MOD_RES (6)..(7): Xaa is C or S
STPPTXXVPTRLSAISILYLDS

SEQ ID NO: 8312 - protein, 19 aa, Artificial Sequence
  Cyclic GFR-binding peptide
PTELEPLPMVYYDENEKVV

SEQ ID NO: 8313 - protein, 15 aa, Artificial Sequence
  Cyclic GFR-binding peptide
SPISILFIVGRKPKV

SEQ ID NO: 8314 - protein, 17 aa, Artificial Sequence
  Cyclic GFR-binding peptide
  MOD_RES (3)..(4): Xaa is C or S
PTXXVPTRLSAISILYL

SEQ ID NO: 8315 - protein, 19 aa, Artificial Sequence
  Cyclic GFR-binding peptide
  MOD_RES (5)..(6): Xaa is C or S
TPPTXXVPTRLNAISILYF

SEQ ID NO: 8316 - protein, 19 aa, Artificial Sequence
  Cyclic GFR-binding peptide
PTKLEPLTVLYYDDSSNVI

SEQ ID NO: 8317 - protein, 18 aa, Artificial Sequence
  Cyclic GFR-binding peptide
  MOD_RES (4)..(5): Xaa is C or S
AAPXXVPQALEPLTILYY

SEQ ID NO: 8318 - protein, 19 aa, Artificial Sequence
  Cyclic GFR-binding peptide
PTQLEPLTVLYYDDSSNVI

SEQ ID NO: 8319 - protein, 20 aa, Artificial Sequence
  Cyclic GFR-binding peptide
  MOD_RES (6)..(7): Xaa is C or S
STPPTXXVPTRLNAISILYF

SEQ ID NO: 8320 - protein, 13 aa, Artificial Sequence
  Cyclic GFR-binding peptide
VPTRLNAISILYF

SEQ ID NO: 8321 - protein, 27 aa, Artificial Sequence
  Cyclic GFR-binding peptide
  MOD_RES (6)..(7): Xaa is C or S
KIPKAXXVPTELEPLPMVYYDENEKVV

SEQ ID NO: 8322 - protein, 17 aa, Artificial Sequence
  Cyclic GFR-binding peptide
  MOD_RES (3)..(4): Xaa is C or S
SPXXVPQDLSPISILFI

SEQ ID NO: 8323 - protein, 18 aa, Artificial Sequence
  Cyclic GFR-binding peptide
QDLEPLPIVYYIGKTPKI

SEQ ID NO: 8324 - protein, 16 aa, Artificial Sequence
  Cyclic GFR-binding peptide
  MOD_RES (2)..(3): Xaa is C or S
PXXVPQALSPISILFI

SEQ ID NO: 8325 - protein, 25 aa, Artificial Sequence
  Cyclic GFR-binding peptide
  MOD_RES (6)..(7): Xaa is C or S
SIPKAXXVPTELSPISMLFIDEYDK

SEQ ID NO: 8326 - protein, 25 aa, Artificial Sequence
  Cyclic GFR-binding peptide
  MOD_RES (6)..(7): Xaa is C or S
YVPKPXXAPTKLEPLTVLYYDDSSN

SEQ ID NO: 8327 - protein, 26 aa, Artificial Sequence
  Cyclic GFR-binding peptide
  MOD_RES (6)..(7): Xaa is C or S
SIPKAXXVPTELSPISMLFIDEYDKV

SEQ ID NO: 8328 - protein, 24 aa, Artificial Sequence
  Cyclic GFR-binding peptide
  MOD_RES (6)..(7): Xaa is C or S
ASASPXXVSQDLSPISILFIIGKT

SEQ ID NO: 8329 - protein, 19 aa, Artificial Sequence
  Cyclic GFR-binding peptide
PQDLEPLPIVYYVGRTPKV

SEQ ID NO: 8330 - protein, 22 aa, Artificial Sequence
  Cyclic GFR-binding peptide
  MOD_RES (6)..(7): Xaa is C or S
KIPKAXXVPTELSPISMLFIDE

SEQ ID NO: 8331 - protein, 18 aa, Artificial Sequence
  Cyclic GFR-binding peptide
  MOD_RES (5)..(5): Xaa is C or S
TKPTXAPTKLEPLPVVYY

SEQ ID NO: 8332 - protein, 18 aa, Artificial Sequence
  Cyclic GFR-binding peptide
TRLEPLPIVYYDSANNVV

SEQ ID NO: 8333 - protein, 16 aa, Artificial Sequence
  Cyclic GFR-binding peptide
LEPLPMVYYDEYDKVV

SEQ ID NO: 8334 - protein, 15 aa, Artificial Sequence
  Cyclic GFR-binding peptide
  MOD_RES (1)..(2): Xaa is C or S
XXVPQALEPLTILYY

SEQ ID NO: 8335 - protein, 13 aa, Artificial Sequence
  Cyclic GFR-binding peptide
APTKLEPLTVLYY

SEQ ID NO: 8336 - protein, 14 aa, Artificial Sequence
  Cyclic GFR-binding peptide
  MOD_RES (1)..(1): Xaa is C or S
XVPQALEPLTILYY

SEQ ID NO: 8337 - protein, 17 aa, Artificial Sequence
  Cyclic GFR-binding peptide
  MOD_RES (3)..(4): Xaa is C or S
SPXXVSQDLSPISILFI

SEQ ID NO: 8338 - protein, 25 aa, Artificial Sequence
  Cyclic GFR-binding peptide
  MOD_RES (6)..(7): Xaa is C or S
TVPKPXXAPTQLEPLPVVYYDDSSN

SEQ ID NO: 8339 - protein, 26 aa, Artificial Sequence
  Cyclic GFR-binding peptide
  MOD_RES (6)..(7): Xaa is C or S
STPPTXXVPTRLEPLTILYYDSANNV

SEQ ID NO: 8340 - protein, 21 aa, Artificial Sequence
  Cyclic GFR-binding peptide
  MOD_RES (6)..(7): Xaa is C or S
SIPKAXXVPTELEPLTMLYYD

SEQ ID NO: 8341 - protein, 27 aa, Artificial Sequence
  Cyclic GFR-binding peptide
  MOD_RES (6)..(7): Xaa is C or S
STPPTXXVPTRLEPLTILYYDSANNVV

SEQ ID NO: 8342 - protein, 19 aa, Artificial Sequence
  Cyclic GFR-binding peptide
PTRLEPLTILYYDSANNVV

SEQ ID NO: 8343 - protein, 18 aa, Artificial Sequence
  Cyclic GFR-binding peptide
TKLEPLPVVYYDDSSNVI

SEQ ID NO: 8344 - protein, 25 aa, Artificial Sequence
  Cyclic GFR-binding peptide
  MOD_RES (6)..(7): Xaa is C or S
TVPKPXXAPTQLSPISVLFIDDSSN

SEQ ID NO: 8345 - protein, 15 aa, Artificial Sequence
  Cyclic GFR-binding peptide
SPISILFIIGKTPKI

SEQ ID NO: 8346 - protein, 23 aa, Artificial Sequence
  Cyclic GFR-binding peptide
  MOD_RES (6)..(7): Xaa is C or S
STPPTXXVPTRLSAISILYLDSA

SEQ ID NO: 8347 - protein, 18 aa, Artificial Sequence
  Cyclic GFR-binding peptide
  MOD_RES (4)..(5): Xaa is C or S
PKPXXAPTQLEPLPVVYY

SEQ ID NO: 8348 - protein, 16 aa, Artificial Sequence
  Cyclic GFR-binding peptide
LEPLTVLYYDDSSNVI

SEQ ID NO: 8349 - protein, 17 aa, Artificial Sequence
  Cyclic GFR-binding peptide
  MOD_RES (3)..(4): Xaa is C or S
PTXXVPTRLNAISILYF

SEQ ID NO: 8350 - protein, 18 aa, Artificial Sequence
  Cyclic GFR-binding peptide
TQLEPLPVVYYDDSSNVI

SEQ ID NO: 8351 - protein, 24 aa, Artificial Sequence
  Cyclic GFR-binding peptide
  MOD_RES (6)..(7): Xaa is C or S
TVPKPXXAPTQLEPLTVLYYDDSS

SEQ ID NO: 8352 - protein, 13 aa, Artificial Sequence
  Cyclic GFR-binding peptide
APTQLEPLPVVYY

SEQ ID NO: 8353 - protein, 16 aa, Artificial Sequence
  Cyclic GFR-binding peptide
  MOD_RES (2)..(3): Xaa is C or S
PXXVSQDLSPISILFI

SEQ ID NO: 8354 - protein, 21 aa, Artificial Sequence
  Cyclic GFR-binding peptide
  MOD_RES (6)..(7): Xaa is C or S
TVPKPXXAPTQLEPLTVLYYD

SEQ ID NO: 8355 - protein, 16 aa, Artificial Sequence
  Cyclic GFR-binding peptide
  MOD_RES (2)..(3): Xaa is C or S
AXXVPTELEPLPMVYY

SEQ ID NO: 8356 - protein, 18 aa, Artificial Sequence
  Cyclic GFR-binding peptide
  MOD_RES (4)..(5): Xaa is C or S
PPTXXVPTRLSAISILYL

SEQ ID NO: 8357 - protein, 18 aa, Artificial Sequence
  Cyclic GFR-binding peptide
QDLSPISILFIVGRTPKV

SEQ ID NO: 8358 - protein, 14 aa, Artificial Sequence
  Cyclic GFR-binding peptide
  MOD_RES (1)..(1): Xaa is C or S
XVPTELSPISMLFI

SEQ ID NO: 8359 - protein, 14 aa, Artificial Sequence
  Cyclic GFR-binding peptide
  MOD_RES (1)..(1): Xaa is C or S
XVPQALSPISILFI

SEQ ID NO: 8360 - protein, 13 aa, Artificial Sequence
  Cyclic GFR-binding peptide
VPQDLEPLPIVYY

SEQ ID NO: 8361 - protein, 22 aa, Artificial Sequence
  Cyclic GFR-binding peptide
  MOD_RES (6)..(7): Xaa is C or S
TVPKPXXAPTQLEPLTVLYYDD

SEQ ID NO: 8362 - protein, 17 aa, Artificial Sequence
  Cyclic GFR-binding peptide
RLEPLPIVYYDSANNVV

SEQ ID NO: 8363 - protein, 17 aa, Artificial Sequence
  Cyclic GFR-binding peptide
  MOD_RES (3)..(4): Xaa is C or S
KPXXAPTQLEPLTVLYY

SEQ ID NO: 8364 - protein, 18 aa, Artificial Sequence
  Cyclic GFR-binding peptide
  MOD_RES (5)..(5): Xaa is C or S
TKPTXAPTKLEPLTVLYY

SEQ ID NO: 8365 - protein, 16 aa, Artificial Sequence
  Cyclic GFR-binding peptide
  MOD_RES (2)..(3): Xaa is C or S
PXXAPTKLEPLPVVYY

SEQ ID NO: 8366 - protein, 15 aa, Artificial Sequence
  Cyclic GFR-binding peptide
SPISMLFIDEYDKVV

SEQ ID NO: 8367 - protein, 13 aa, Artificial Sequence
  Cyclic GFR-binding peptide
VPTRLSAISILYL

SEQ ID NO: 8368 - protein, 16 aa, Artificial Sequence
  Cyclic GFR-binding peptide
  MOD_RES (3)..(3): Xaa is C or S
PTXAPTKLEPLTVLYY

SEQ ID NO: 8369 - protein, 19 aa, Artificial Sequence
  Cyclic GFR-binding peptide
  MOD_RES (5)..(6): Xaa is C or S
SASPXXVPQDLSPISILFI

SEQ ID NO: 8370 - protein, 20 aa, Artificial Sequence
  Cyclic GFR-binding peptide
  MOD_RES (6)..(7): Xaa is C or S
YVPKPXXAPTKLSPISVLFI

SEQ ID NO: 8371 - protein, 16 aa, Artificial Sequence
  Cyclic GFR-binding peptide
  MOD_RES (2)..(3): Xaa is C or S
AXXVPTELSPISMLFI

SEQ ID NO: 8372 - protein, 13 aa, Artificial Sequence
  Cyclic GFR-binding peptide
VPTELEPLTMLYY

SEQ ID NO: 8373 - protein, 15 aa, Artificial Sequence
  Cyclic GFR-binding peptide
  MOD_RES (1)..(2): Xaa is C or S
XXVPTELEPLTMLYY

SEQ ID NO: 8374 - protein, 24 aa, Artificial Sequence
  Cyclic GFR-binding peptide
  MOD_RES (6)..(7): Xaa is C or S
ASAAPXXVPQALEPLTILYYVGRK

SEQ ID NO: 8375 - protein, 15 aa, Artificial Sequence
  Cyclic GFR-binding peptide
  MOD_RES (1)..(2): Xaa is C or S
XXVSQDLSPISILFI

SEQ ID NO: 8376 - protein, 18 aa, Artificial Sequence
  Cyclic GFR-binding peptide
TKLSPISVLFIDDSSNVI

SEQ ID NO: 8377 - protein, 17 aa, Artificial Sequence
  Cyclic GFR-binding peptide
  MOD_RES (4)..(4): Xaa is C or S
KPTXAPTKLSPISVLFI

SEQ ID NO: 8378 - protein, 17 aa, Artificial Sequence
  Cyclic GFR-binding peptide
  MOD_RES (3)..(4): Xaa is C or S
KPXXAPTQLEPLPVVYY

SEQ ID NO: 8379 - protein, 14 aa, Artificial Sequence
  Cyclic GFR-binding peptide
  MOD_RES (1)..(1): Xaa is C or S
XAPTQLEPLPVVYY

SEQ ID NO: 8380 - protein, 18 aa, Artificial Sequence
  Cyclic GFR-binding peptide
TELEPLTMLYYDENEKVV

SEQ ID NO: 8381 - protein, 17 aa, Artificial Sequence
  Cyclic GFR-binding peptide
  MOD_RES (4)..(4): Xaa is C or S
KPTXAPTKLEPLPVVYY

SEQ ID NO: 8382 - protein, 18 aa, Artificial Sequence
  Cyclic GFR-binding peptide
TQLSPISVLFIDDSSNVI

SEQ ID NO: 8383 - protein, 19 aa, Artificial Sequence
  Cyclic GFR-binding peptide
  MOD_RES (5)..(6): Xaa is C or S
IPKAXXVPTELSPISMLFI

SEQ ID NO: 8384 - protein, 26 aa, Artificial Sequence
  Cyclic GFR-binding peptide
  MOD_RES (6)..(7): Xaa is C or S
TVPKPXXAPTQLEPLPVVYYDDSSNV

SEQ ID NO: 8385 - protein, 19 aa, Artificial Sequence
  Cyclic GFR-binding peptide
  MOD_RES (5)..(6): Xaa is C or S
TPPTXXVPTRLSAISILYL

SEQ ID NO: 8386 - protein, 16 aa, Artificial Sequence
  Cyclic GFR-binding peptide
  MOD_RES (3)..(3): Xaa is C or S
PTXAPTKLEPLPVVYY

SEQ ID NO: 8387 - protein, 17 aa, Artificial Sequence
  Cyclic GFR-binding peptide
  MOD_RES (3)..(4): Xaa is C or S
SPXXVSQDLEPLPIVYY

SEQ ID NO: 8388 - protein, 16 aa, Artificial Sequence
  Cyclic GFR-binding peptide
  MOD_RES (2)..(3): Xaa is C or S
PXXAPTKLEPLTVLYY

SEQ ID NO: 8389 - protein, 25 aa, Artificial Sequence
  Cyclic GFR-binding peptide
  MOD_RES (7)..(7): Xaa is C or S
HVTKPTXAPTKLEPLTVLYYDDSSN

SEQ ID NO: 8390 - protein, 23 aa, Artificial Sequence
  Cyclic GFR-binding peptide
  MOD_RES (6)..(7): Xaa is C or S
TVPKPXXAPTQLEPLPVVYYDDS

SEQ ID NO: 8391 - protein, 15 aa, Artificial Sequence
  Cyclic GFR-binding peptide
EPLPMVYYDENEKVV

SEQ ID NO: 8392 - protein, 19 aa, Artificial Sequence
  Cyclic GFR-binding peptide
  MOD_RES (5)..(6): Xaa is C or S
SAAPXXVPQALSPISILFI

SEQ ID NO: 8393 - protein, 13 aa, Artificial Sequence
  Cyclic GFR-binding peptide
VPQDLSPISILFI

SEQ ID NO: 8394 - protein, 13 aa, Artificial Sequence
  Cyclic GFR-binding peptide
VPTELSPISMLFI

SEQ ID NO: 8395 - protein, 17 aa, Artificial Sequence
  Cyclic GFR-binding peptide
ELSPISMLFIDEYDKVV

SEQ ID NO: 8396 - protein, 16 aa, Artificial Sequence
  Cyclic GFR-binding peptide
  MOD_RES (2)..(3): Xaa is C or S
TXXVPTRLEPLTILYY

SEQ ID NO: 8397 - protein, 26 aa, Artificial Sequence
  Cyclic GFR-binding peptide
  MOD_RES (6)..(7): Xaa is C or S
ASAAPXXVPQALEPLTILYYVGRKPK

SEQ ID NO: 8398 - protein, 21 aa, Artificial Sequence
  Cyclic GFR-binding peptide
  MOD_RES (6)..(7): Xaa is C or S
ASASPXXVSQDLSPISILFII

SEQ ID NO: 8399 - protein, 16 aa, Artificial Sequence
  Cyclic GFR-binding peptide
  MOD_RES (3)..(3): Xaa is C or S
PTXAPTKLSPISVLFI

SEQ ID NO: 8400 - protein, 17 aa, Artificial Sequence
  Cyclic GFR-binding peptide
  MOD_RES (4)..(4): Xaa is C or S
KPTXAPTKLEPLTVLYY

SEQ ID NO: 8401 - protein, 14 aa, Artificial Sequence
  Cyclic GFR-binding peptide
  MOD_RES (1)..(1): Xaa is C or S
XVSQDLSPISILFI

SEQ ID NO: 8402 - protein, 17 aa, Artificial Sequence
  Cyclic GFR-binding peptide
ELEPLPMVYYDENEKVV

SEQ ID NO: 8403 - protein, 18 aa, Artificial Sequence
  Cyclic GFR-binding peptide
QALSPISILFIVGRKPKV

SEQ ID NO: 8404 - protein, 16 aa, Artificial Sequence
  Cyclic GFR-binding peptide
  MOD_RES (2)..(3): Xaa is C or S
AXXVPTELEPLTMLYY

SEQ ID NO: 8405 - protein, 16 aa, Artificial Sequence
  Cyclic GFR-binding peptide
LEPLPIVYYVGRTPKV

SEQ ID NO: 8406 - protein, 25 aa, Artificial Sequence
  Cyclic GFR-binding peptide
  MOD_RES (6)..(7): Xaa is C or S
SIPKAXXVPTELEPLPMVYYDEYDK

SEQ ID NO: 8407 - protein, 14 aa, Artificial Sequence
  Cyclic GFR-binding peptide
  MOD_RES (1)..(1): Xaa is C or S
XAPTQLEPLTVLYY

SEQ ID NO: 8408 - protein, 15 aa, Artificial Sequence
  Cyclic GFR-binding peptide
  MOD_RES (1)..(2): Xaa is C or S
XXVPQDLEPLPIVYY

SEQ ID NO: 8409 - protein, 13 aa, Artificial Sequence
  Cyclic GFR-binding peptide
VSQDLSPISILFI

SEQ ID NO: 8410 - protein, 19 aa, Artificial Sequence
  Cyclic GFR-binding peptide
  MOD_RES (5)..(6): Xaa is C or S
IPKAXXVPTELEPLTMLYY

SEQ ID NO: 8411 - protein, 15 aa, Artificial Sequence
  Cyclic GFR-binding peptide
  MOD_RES (1)..(2): Xaa is C or S
XXVPQALSPISILFI

SEQ ID NO: 8412 - protein, 26 aa, Artificial Sequence
  Cyclic GFR-binding peptide
  MOD_RES (6)..(7): Xaa is C or S
ASASPXXVSQDLSPISILFIIGKTPK

SEQ ID NO: 8413 - protein, 19 aa, Artificial Sequence
  Cyclic GFR-binding peptide
PTELEPLTMLYYDENEKVV

SEQ ID NO: 8414 - protein, 27 aa, Artificial Sequence
  Cyclic GFR-binding peptide
  MOD_RES (6)..(7): Xaa is C or S
ASASPXXVSQDLSPISILFIIGKTPKI

SEQ ID NO: 8415 - protein, 23 aa, Artificial Sequence
  Cyclic GFR-binding peptide
  MOD_RES (6)..(7): Xaa is C or S
KIPKAXXVPTELSPISMLFIDEN

SEQ ID NO: 8416 - protein, 16 aa, Artificial Sequence
  Cyclic GFR-binding peptide
  MOD_RES (2)..(3): Xaa is C or S
PXXAPTKLSPISVLFI

SEQ ID NO: 8417 - protein, 17 aa, Artificial Sequence
  Cyclic GFR-binding peptide
  MOD_RES (3)..(4): Xaa is C or S
APXXVPQALEPLTILYY

SEQ ID NO: 8418 - protein, 19 aa, Artificial Sequence
  Cyclic GFR-binding peptide
  MOD_RES (5)..(6): Xaa is C or S
SASPXXVPQDLEPLPIVYY

SEQ ID NO: 8419 - protein, 27 aa, Artificial Sequence
  Cyclic GFR-binding peptide
  MOD_RES (6)..(7): Xaa is C or S
YVPKPXXAPTKLEPLTVLYYDDSSNVI

SEQ ID NO: 8420 - protein, 19 aa, Artificial Sequence
  Cyclic GFR-binding peptide
PTELSPISMLFIDEYDKVV

SEQ ID NO: 8421 - protein, 26 aa, Artificial Sequence
  Cyclic GFR-binding peptide
  MOD_RES (6)..(7): Xaa is C or S
KIPKAXXVPTELEPLTMLYYDENEKV

SEQ ID NO: 8422 - protein, 14 aa, Artificial Sequence
  Cyclic GFR-binding peptide
  MOD_RES (1)..(1): Xaa is C or S
XAPTQLSPISVLFI

SEQ ID NO: 8423 - protein, 19 aa, Artificial Sequence
  Cyclic GFR-binding peptide
  MOD_RES (5)..(6): Xaa is C or S
VPKPXXAPTQLSPISVLFI

SEQ ID NO: 8424 - protein, 17 aa, Artificial Sequence
  Cyclic GFR-binding peptide
DLSPISILFIIGKTPKI

SEQ ID NO: 8425 - protein, 20 aa, Artificial Sequence
  Cyclic GFR-binding peptide
  MOD_RES (6)..(7): Xaa is C or S
TVPKPXXAPTQLSPISVLFI

SEQ ID NO: 8426 - protein, 14 aa, Artificial Sequence
  Cyclic GFR-binding peptide
  MOD_RES (1)..(1): Xaa is C or S
XVSQDLEPLPIVYY

SEQ ID NO: 8427 - protein, 24 aa, Artificial Sequence
  Cyclic GFR-binding peptide
  MOD_RES (7)..(7): Xaa is C or S
HVTKPTXAPTKLSPISVLFIDDSS

SEQ ID NO: 8428 - protein, 13 aa, Artificial Sequence
  Cyclic GFR-binding peptide
VPTELEPLPMVYY

SEQ ID NO: 8429 - protein, 15 aa, Artificial Sequence
  Cyclic GFR-binding peptide
  MOD_RES (1)..(2): Xaa is C or S
XXVPTELEPLPMVYY

SEQ ID NO: 8430 - protein, 27 aa, Artificial Sequence
  Cyclic GFR-binding peptide
  MOD_RES (7)..(7): Xaa is C or S
HVTKPTXAPTKLSPISVLFIDDSSNVI

SEQ ID NO: 8431 - protein, 23 aa, Artificial Sequence
  Cyclic GFR-binding peptide
  MOD_RES (7)..(7): Xaa is C or S
HVTKPTXAPTKLEPLPVVYYDDS

SEQ ID NO: 8432 - protein, 13 aa, Artificial Sequence
  Cyclic GFR-binding peptide
APTQLSPISVLFI

SEQ ID NO: 8433 - protein, 18 aa, Artificial Sequence
  Cyclic GFR-binding peptide
QDLSPISILFIIGKTPKI

SEQ ID NO: 8434 - protein, 25 aa, Artificial Sequence
  Cyclic GFR-binding peptide
  MOD_RES (6)..(7): Xaa is C or S
ASAAPXXVPQALSPISILFIVGRKP

SEQ ID NO: 8435 - protein, 21 aa, Artificial Sequence
  Cyclic GFR-binding peptide
  MOD_RES (6)..(7): Xaa is C or S
STPPTXXVPTRLNAISILYFD

SEQ ID NO: 8436 - protein, 16 aa, Artificial Sequence
  Cyclic GFR-binding peptide
LEPLPMVYYDENEKVV

SEQ ID NO: 8437 - protein, 16 aa, Artificial Sequence
  Cyclic GFR-binding peptide
LSPISMLFIDEYDKVV

SEQ ID NO: 8438 - protein, 13 aa, Artificial Sequence
  Cyclic GFR-binding peptide
VSQDLEPLPIVYY

SEQ ID NO: 8439 - protein, 26 aa, Artificial Sequence
  Cyclic GFR-binding peptide
  MOD_RES (6)..(7): Xaa is C or S
ASASPXXVPQDLSPISILFIVGRTPK

SEQ ID NO: 8440 - protein, 19 aa, Artificial Sequence
  Cyclic GFR-binding peptide
  MOD_RES (5)..(6): Xaa is C or S
VPKPXXAPTQLEPLTVLYY

SEQ ID NO: 8441 - protein, 14 aa, Artificial Sequence
  Cyclic GFR-binding peptide
  MOD_RES (1)..(1): Xaa is C or S
XVPTELEPLTMLYY

SEQ ID NO: 8442 - protein, 27 aa, Artificial Sequence
  Cyclic GFR-binding peptide
  MOD_RES (6)..(7): Xaa is C or S
ASASPXXVPQDLEPLPIVYYVGRTPKV

SEQ ID NO: 8443 - protein, 20 aa, Artificial Sequence
  Cyclic GFR-binding peptide
  MOD_RES (6)..(7): Xaa is C or S
YVPKPXXAPTKLEPLTVLYY

SEQ ID NO: 8444 - protein, 14 aa, Artificial Sequence
  Cyclic GFR-binding peptide
  MOD_RES (1)..(1): Xaa is C or S
XVPTELEPLPMVYY

SEQ ID NO: 8445 - protein, 25 aa, Artificial Sequence
  Cyclic GFR-binding peptide
  MOD_RES (6)..(7): Xaa is C or S
SIPKAXXVPTELEPLTMLYYDEYDK

SEQ ID NO: 8446 - protein, 17 aa, Artificial Sequence
  Cyclic GFR-binding peptide
  MOD_RES (3)..(4): Xaa is C or S
SPXXVPQDLEPLPIVYY

SEQ ID NO: 8447 - protein, 13 aa, Artificial Sequence
  Cyclic GFR-binding peptide
VPQALSPISILFI

SEQ ID NO: 8448 - protein, 17 aa, Artificial Sequence
  Cyclic GFR-binding peptide
RLNAISILYFDSANNVV

SEQ ID NO: 8449 - protein, 16 aa, Artificial Sequence
  Cyclic GFR-binding peptide
  MOD_RES (2)..(3): Xaa is C or S
TXXVPTRLNAISILYF

SEQ ID NO: 8450 - protein, 17 aa, Artificial Sequence
  Cyclic GFR-binding peptide
ALSPISILFIVGRKPKV

SEQ ID NO: 8451 - protein, 15 aa, Artificial Sequence
  Cyclic GFR-binding peptide
  MOD_RES (1)..(2): Xaa is C or S
XXVSQDLEPLPIVYY

SEQ ID NO: 8452 - protein, 18 aa, Artificial Sequence
  Cyclic GFR-binding peptide
TRLEPLTILYYDSANNVV

SEQ ID NO: 8453 - protein, 20 aa, Artificial Sequence
  Cyclic GFR-binding peptide
  MOD_RES (6)..(7): Xaa is C or S
TVPKPXXAPTQLEPLTVLYY

SEQ ID NO: 8454 - protein, 26 aa, Artificial Sequence
  Cyclic GFR-binding peptide
  MOD_RES (7)..(7): Xaa is C or S
HVTKPTXAPTKLEPLPVVYYDDSSNV

SEQ ID NO: 8455 - protein, 19 aa, Artificial Sequence
  Cyclic GFR-binding peptide
PQDLSPISILFIVGRTPKV

SEQ ID NO: 8456 - protein, 16 aa, Artificial Sequence
  Cyclic GFR-binding peptide
LSPISMLFIDENEKVV

SEQ ID NO: 8457 - protein, 15 aa, Artificial Sequence
  Cyclic GFR-binding peptide
  MOD_RES (1)..(2): Xaa is C or S
XXVPQDLSPISILFI

SEQ ID NO: 8458 - protein, 19 aa, Artificial Sequence
  Cyclic GFR-binding peptide
  MOD_RES (5)..(6): Xaa is C or S
SAAPXXVPQALEPLTILYY

SEQ ID NO: 8459 - protein, 14 aa, Artificial Sequence
  Cyclic GFR-binding peptide
  MOD_RES (1)..(1): Xaa is C or S
XVPQDLSPISILFI

SEQ ID NO: 8460 - protein, 19 aa, Artificial Sequence
  Cyclic GFR-binding peptide
PQALSPISILFIVGRKPKV

SEQ ID NO: 8461 - protein, 22 aa, Artificial Sequence
  Cyclic GFR-binding peptide
  MOD_RES (6)..(7): Xaa is C or S
STPPTXXVPTRLNAISILYFDS

SEQ ID NO: 8462 - protein, 17 aa, Artificial Sequence
  Cyclic GFR-binding peptide
  MOD_RES (3)..(4): Xaa is C or S
PTXXVPTRLEPLTILYY

SEQ ID NO: 8463 - protein, 16 aa, Artificial Sequence
  Cyclic GFR-binding peptide
LEPLTILYYDSANNVV

SEQ ID NO: 8464 - protein, 23 aa, Artificial Sequence
  Cyclic GFR-binding peptide
  MOD_RES (7)..(7): Xaa is C or S
HVTKPTXAPTKLSPISVLFIDDS

SEQ ID NO: 8465 - protein, 24 aa, Artificial Sequence
  Cyclic GFR-binding peptide
  MOD_RES (6)..(7): Xaa is C or S
ASASPXXVSQDLEPLPIVYYIGKT

SEQ ID NO: 8466 - protein, 21 aa, Artificial Sequence
  Cyclic GFR-binding peptide
  MOD_RES (7)..(7): Xaa is C or S
HVTKPTXAPTKLEPLTVLYYD

SEQ ID NO: 8467 - protein, 25 aa, Artificial Sequence
  Cyclic GFR-binding peptide
  MOD_RES (6)..(7): Xaa is C or S
YVPKPXXAPTKLSPISVLFIDDSSN

SEQ ID NO: 8468 - protein, 21 aa, Artificial Sequence
  Cyclic GFR-binding peptide
  MOD_RES (6)..(7): Xaa is C or S
ASASPXXVPQDLSPISILFIV

SEQ ID NO: 8469 - protein, 18 aa, Artificial Sequence
  Cyclic GFR-binding peptide
  MOD_RES (4)..(5): Xaa is C or S
PPTXXVPTRLEPLPIVYY

SEQ ID NO: 8470 - protein, 19 aa, Artificial Sequence
  Cyclic GFR-binding peptide
PTRLEPLPIVYYDSANNVV

SEQ ID NO: 8471 - protein, 15 aa, Artificial Sequence
  Cyclic GFR-binding peptide
  MOD_RES (1)..(2): Xaa is C or S
XXAPTQLSPISVLFI

SEQ ID NO: 8472 - protein, 15 aa, Artificial Sequence
  Cyclic GFR-binding peptide
EPLTMLYYDENEKVV

SEQ ID NO: 8473 - protein, 24 aa, Artificial Sequence
  Cyclic GFR-binding peptide
  MOD_RES (6)..(7): Xaa is C or S
STPPTXXVPTRLEPLTILYYDSAN

SEQ ID NO: 8474 - protein, 23 aa, Artificial Sequence
  Cyclic GFR-binding peptide
  MOD_RES (6)..(7): Xaa is C or S
ASAAPXXVPQALEPLTILYYVGR

SEQ ID NO: 8475 - protein, 25 aa, Artificial Sequence
  Cyclic GFR-binding peptide
  MOD_RES (6)..(7): Xaa is C or S
ASASPXXVSQDLSPISILFIIGKTP

SEQ ID NO: 8476 - protein, 16 aa, Artificial Sequence
  Cyclic GFR-binding peptide
  MOD_RES (2)..(3): Xaa is C or S
TXXVPTRLSAISILYL

SEQ ID NO: 8477 - protein, 18 aa, Artificial Sequence
  Cyclic GFR-binding peptide
  MOD_RES (5)..(5): Xaa is C or S
TKPTXAPTKLSPISVLFI

SEQ ID NO: 8478 - protein, 19 aa, Artificial Sequence
  Cyclic GFR-binding peptide
  MOD_RES (5)..(6): Xaa is C or S
IPKAXXVPTELEPLPMVYY

SEQ ID NO: 8479 - protein, 24 aa, Artificial Sequence
  Cyclic GFR-binding peptide
  MOD_RES (6)..(7): Xaa is C or S
SIPKAXXVPTELEPLTMLYYDEYD

SEQ ID NO: 8480 - protein, 16 aa, Artificial Sequence
  Cyclic GFR-binding peptide
LEPLTILYYVGRKPKV

SEQ ID NO: 8481 - protein, 17 aa, Artificial Sequence
  Cyclic GFR-binding peptide
DLSPISILFIVGRTPKV

SEQ ID NO: 8482 - protein, 19 aa, Artificial Sequence
  Cyclic GFR-binding peptide
  MOD_RES (5)..(6): Xaa is C or S
SASPXXVSQDLEPLPIVYY

SEQ ID NO: 8483 - protein, 18 aa, Artificial Sequence
  Cyclic GFR-binding peptide
TELEPLPMVYYDEYDKVV

SEQ ID NO: 8484 - protein, 27 aa, Artificial Sequence
  Cyclic GFR-binding peptide
  MOD_RES (6)..(7): Xaa is C or S
TVPKPXXAPTQLEPLTVLYYDDSSNVI

SEQ ID NO: 8485 - protein, 17 aa, Artificial Sequence
  Cyclic GFR-binding peptide
  MOD_RES (3)..(4): Xaa is C or S
KPXXAPTQLSPISVLFI

SEQ ID NO: 8486 - protein, 20 aa, Artificial Sequence
  Cyclic GFR-binding peptide
  MOD_RES (6)..(7): Xaa is C or S
YVPKPXXAPTKLEPLPVVYY

SEQ ID NO: 8487 - protein, 27 aa, Artificial Sequence
  Cyclic GFR-binding peptide
  MOD_RES (6)..(7): Xaa is C or S
KIPKAXXVPTELSPISMLFIDENEKVV

SEQ ID NO: 8488 - protein, 27 aa, Artificial Sequence
  Cyclic GFR-binding peptide
  MOD_RES (6)..(7): Xaa is C or S
STPPTXXVPTRLNAISILYFDSANNVV

SEQ ID NO: 8489 - protein, 26 aa, Artificial Sequence
  Cyclic GFR-binding peptide
  MOD_RES (6)..(7): Xaa is C or S
ASASPXXVSQDLEPLPIVYYIGKTPK

SEQ ID NO: 8490 - protein, 20 aa, Artificial Sequence
  Cyclic GFR-binding peptide
  MOD_RES (6)..(7): Xaa is C or S
STPPTXXVPTRLEPLTILYY

SEQ ID NO: 8491 - protein, 24 aa, Artificial Sequence
  Cyclic GFR-binding peptide
  MOD_RES (6)..(7): Xaa is C or S
KIPKAXXVPTELSPISMLFIDENE

SEQ ID NO: 8492 - protein, 25 aa, Artificial Sequence
  Cyclic GFR-binding peptide
  MOD_RES (6)..(7): Xaa is C or S
STPPTXXVPTRLEPLTILYYDSANN

SEQ ID NO: 8493 - protein, 22 aa, Artificial Sequence
  Cyclic GFR-binding peptide
  MOD_RES (6)..(7): Xaa is C or S
ASASPXXVSQDLSPISILFIIG

SEQ ID NO: 8494 - protein, 23 aa, Artificial Sequence
  Cyclic GFR-binding peptide
  MOD_RES (6)..(7): Xaa is C or S
KIPKAXXVPTELEPLTMLYYDEN

SEQ ID NO: 8495 - protein, 26 aa, Artificial Sequence
  Cyclic GFR-binding peptide
  MOD_RES (6)..(7): Xaa is C or S
STPPTXXVPTRLNAISILYFDSANNV

SEQ ID NO: 8496 - protein, 18 aa, Artificial Sequence
  Cyclic GFR-binding peptide
  MOD_RES (4)..(5): Xaa is C or S
PKAXXVPTELEPLPMVYY

SEQ ID NO: 8497 - protein, 23 aa, Artificial Sequence
  Cyclic GFR-binding peptide
  MOD_RES (6)..(7): Xaa is C or S
SIPKAXXVPTELSPISMLFIDEY

SEQ ID NO: 8498 - protein, 21 aa, Artificial Sequence
  Cyclic GFR-binding peptide
  MOD_RES (6)..(7): Xaa is C or S
KIPKAXXVPTELEPLTMLYYD

SEQ ID NO: 8499 - protein, 18 aa, Artificial Sequence
  Cyclic GFR-binding peptide
  MOD_RES (4)..(5): Xaa is C or S
ASPXXVSQDLEPLPIVYY

SEQ ID NO: 8500 - protein, 17 aa, Artificial Sequence
  Cyclic GFR-binding peptide
ELEPLTMLYYDENEKVV

SEQ ID NO: 8501 - protein, 23 aa, Artificial Sequence
  Cyclic GFR-binding peptide
  MOD_RES (7)..(7): Xaa is C or S
HVTKPTXAPTKLEPLTVLYYDDS

SEQ ID NO: 8502 - protein, 27 aa, Artificial Sequence
  Cyclic GFR-binding peptide
  MOD_RES (6)..(7): Xaa is C or S
STPPTXXVPTRLSAISILYLDSANNVV

SEQ ID NO: 8503 - protein, 15 aa, Artificial Sequence
  Cyclic GFR-binding peptide
SPISVLFIDDSSNVI

SEQ ID NO: 8504 - protein, 23 aa, Artificial Sequence
  Cyclic GFR-binding peptide
  MOD_RES (6)..(7): Xaa is C or S
STPPTXXVPTRLEPLTILYYDSA

SEQ ID NO: 8505 - protein, 13 aa, Artificial Sequence
  Cyclic GFR-binding peptide
VPQALEPLTILYY

SEQ ID NO: 8506 - protein, 17 aa, Artificial Sequence
  Cyclic GFR-binding peptide
  MOD_RES (3)..(4): Xaa is C or S
PTXXVPTRLEPLPIVYY

SEQ ID NO: 8507 - protein, 15 aa, Artificial Sequence
  Cyclic GFR-binding peptide
EPLPIVYYVGRTPKV

SEQ ID NO: 8508 - protein, 15 aa, Artificial Sequence
  Cyclic GFR-binding peptide
EPLPMVYYDEYDKVV

SEQ ID NO: 8509 - protein, 26 aa, Artificial Sequence
  Cyclic GFR-binding peptide
  MOD_RES (6)..(7): Xaa is C or S
KIPKAXXVPTELSPISMLFIDENEKV

SEQ ID NO: 8510 - protein, 16 aa, Artificial Sequence
  Cyclic GFR-binding peptide
LEPLPIVYYDSANNVV

SEQ ID NO: 8511 - protein, 15 aa, Artificial Sequence
  Cyclic GFR-binding peptide
EPLTVLYYDDSSNVI

SEQ ID NO: 8512 - protein, 19 aa, Artificial Sequence
  Cyclic GFR-binding peptide
PTRLSAISILYLDSANNVV

SEQ ID NO: 8513 - protein, 24 aa, Artificial Sequence
  Cyclic GFR-binding peptide
  MOD_RES (6)..(7): Xaa is C or S
SIPKAXXVPTELEPLPMVYYDEYD

SEQ ID NO: 8514 - protein, 18 aa, Artificial Sequence
  Cyclic GFR-binding peptide
  MOD_RES (4)..(5): Xaa is C or S
PKAXXVPTELEPLTMLYY

SEQ ID NO: 8515 - protein, 17 aa, Artificial Sequence
  Cyclic GFR-binding peptide
  MOD_RES (3)..(4): Xaa is C or S
APXXVPQALSPISILFI

SEQ ID NO: 8516 - protein, 20 aa, Artificial Sequence
  Cyclic GFR-binding peptide
  MOD_RES (6)..(7): Xaa is C or S
ASASPXXVPQDLEPLPIVYY

SEQ ID NO: 8517 - protein, 14 aa, Artificial Sequence
  Cyclic GFR-binding peptide
  MOD_RES (1)..(1): Xaa is C or S
XVPTRLNAISILYF

SEQ ID NO: 8518 - protein, 26 aa, Artificial Sequence
  Cyclic GFR-binding peptide
  MOD_RES (6)..(7): Xaa is C or S
SIPKAXXVPTELEPLPMVYYDEYDKV

SEQ ID NO: 8519 - protein, 24 aa, Artificial Sequence
  Cyclic GFR-binding peptide
  MOD_RES (6)..(7): Xaa is C or S
ASASPXXVPQDLSPISILFIVGRT

SEQ ID NO: 8520 - protein, 14 aa, Artificial Sequence
  Cyclic GFR-binding peptide
  MOD_RES (1)..(1): Xaa is C or S
XVPTRLSAISILYL

SEQ ID NO: 8521 - protein, 19 aa, Artificial Sequence
  Cyclic GFR-binding peptide
PTKLSPISVLFIDDSSNVI

SEQ ID NO: 8522 - protein, 21 aa, Artificial Sequence
  Cyclic GFR-binding peptide
  MOD_RES (6)..(7): Xaa is C or S
ASAAPXXVPQALEPLTILYYV

SEQ ID NO: 8523 - protein, 20 aa, Artificial Sequence
  Cyclic GFR-binding peptide
  MOD_RES (6)..(7): Xaa is C or S
STPPTXXVPTRLEPLPIVYY

SEQ ID NO: 8524 - protein, 23 aa, Artificial Sequence
  Cyclic GFR-binding peptide
  MOD_RES (6)..(7): Xaa is C or S
TVPKPXXAPTQLEPLTVLYYDDS

SEQ ID NO: 8525 - protein, 26 aa, Artificial Sequence
  Cyclic GFR-binding peptide
  MOD_RES (6)..(7): Xaa is C or S
SIPKAXXVPTELEPLTMLYYDEYDKV

SEQ ID NO: 8526 - protein, 19 aa, Artificial Sequence
  Cyclic GFR-binding peptide
PTQLSPISVLFIDDSSNVI

SEQ ID NO: 8527 - protein, 24 aa, Artificial Sequence
  Cyclic GFR-binding peptide
  MOD_RES (6)..(7): Xaa is C or S
KIPKAXXVPTELEPLTMLYYDENE

SEQ ID NO: 8528 - protein, 21 aa, Artificial Sequence
  Cyclic GFR-binding peptide
  MOD_RES (6)..(7): Xaa is C or S
YVPKPXXAPTKLSPISVLFID

SEQ ID NO: 8529 - protein, 15 aa, Artificial Sequence
  Cyclic GFR-binding peptide
SPISMLFIDENEKVV

SEQ ID NO: 8530 - protein, 23 aa, Artificial Sequence
  Cyclic GFR-binding peptide
  MOD_RES (6)..(7): Xaa is C or S
YVPKPXXAPTKLEPLTVLYYDDS

SEQ ID NO: 8531 - protein, 26 aa, Artificial Sequence
  Cyclic GFR-binding peptide
  MOD_RES (6)..(7): Xaa is C or S
STPPTXXVPTRLSAISILYLDSANNV

SEQ ID NO: 8532 - protein, 17 aa, Artificial Sequence
  Cyclic GFR-binding peptide
  MOD_RES (3)..(4): Xaa is C or S
KAXXVPTELEPLPMVYY

SEQ ID NO: 8533 - protein, 26 aa, Artificial Sequence
  Cyclic GFR-binding peptide
  MOD_RES (6)..(7): Xaa is C or S
TVPKPXXAPTQLSPISVLFIDDSSNV

SEQ ID NO: 8534 - protein, 15 aa, Artificial Sequence
  Cyclic GFR-binding peptide
  MOD_RES (1)..(2): Xaa is C or S
XXAPTQLEPLPVVYY

SEQ ID NO: 8535 - protein, 27 aa, Artificial Sequence
  Cyclic GFR-binding peptide
  MOD_RES (6)..(7): Xaa is C or S
ASAAPXXVPQALEPLTILYYVGRKPKV

SEQ ID NO: 8536 - protein, 19 aa, Artificial Sequence
  Cyclic GFR-binding peptide
  MOD_RES (5)..(6): Xaa is C or S
SASPXXVSQDLSPISILFI

SEQ ID NO: 8537 - protein, 16 aa, Artificial Sequence
  Cyclic GFR-binding peptide
LSPISILFIVGRTPKV

SEQ ID NO: 8538 - protein, 27 aa, Artificial Sequence
  Cyclic GFR-binding peptide
  MOD_RES (6)..(7): Xaa is C or S
TVPKPXXAPTQLEPLPVVYYDDSSNVI

SEQ ID NO: 8539 - protein, 20 aa, Artificial Sequence
  Cyclic GFR-binding peptide
  MOD_RES (6)..(7): Xaa is C or S
TVPKPXXAPTQLEPLPVVYY

SEQ ID NO: 8540 - protein, 16 aa, Artificial Sequence
  Cyclic GFR-binding peptide
  MOD_RES (2)..(3): Xaa is C or S
PXXAPTQLEPLPVVYY

SEQ ID NO: 8541 - protein, 25 aa, Artificial Sequence
  Cyclic GFR-binding peptide
  MOD_RES (6)..(7): Xaa is C or S
ASAAPXXVPQALEPLTILYYVGRKP

SEQ ID NO: 8542 - protein, 16 aa, Artificial Sequence
  Cyclic GFR-binding peptide
LSPISVLFIDDSSNVI

SEQ ID NO: 8543 - protein, 21 aa, Artificial Sequence
  Cyclic GFR-binding peptide
  MOD_RES (6)..(7): Xaa is C or S
YVPKPXXAPTKLEPLTVLYYD

SEQ ID NO: 8544 - protein, 17 aa, Artificial Sequence
  Cyclic GFR-binding peptide
ALEPLTILYYVGRKPKV

SEQ ID NO: 8545 - protein, 26 aa, Artificial Sequence
  Cyclic GFR-binding peptide
  MOD_RES (6)..(7): Xaa is C or S
YVPKPXXAPTKLEPLPVVYYDDSSNV

SEQ ID NO: 8546 - protein, 22 aa, Artificial Sequence
  Cyclic GFR-binding peptide
  MOD_RES (6)..(7): Xaa is C or S
SIPKAXXVPTELEPLPMVYYDE

SEQ ID NO: 8547 - protein, 24 aa, Artificial Sequence
  Cyclic GFR-binding peptide
  MOD_RES (6)..(7): Xaa is C or S
TVPKPXXAPTQLEPLPVVYYDDSS

SEQ ID NO: 8548 - protein, 19 aa, Artificial Sequence
  Cyclic GFR-binding peptide
  MOD_RES (5)..(6): Xaa is C or S
VPKPXXAPTQLEPLPVVYY

SEQ ID NO: 8549 - protein, 27 aa, Artificial Sequence
  Cyclic GFR-binding peptide
  MOD_RES (6)..(7): Xaa is C or S
ASASPXXVPQDLSPISILFIVGRTPKV

SEQ ID NO: 8550 - protein, 15 aa, Artificial Sequence
  Cyclic GFR-binding peptide
  MOD_RES (1)..(2): Xaa is C or S
XXAPTQLEPLTVLYY

SEQ ID NO: 8551 - protein, 26 aa, Artificial Sequence
  Cyclic GFR-binding peptide
  MOD_RES (7)..(7): Xaa is C or S
HVTKPTXAPTKLEPLTVLYYDDSSNV

SEQ ID NO: 8552 - protein, 15 aa, Artificial Sequence
  Cyclic GFR-binding peptide
EPLTILYYVGRKPKV

SEQ ID NO: 8553 - protein, 18 aa, Artificial Sequence
  Cyclic GFR-binding peptide
  MOD_RES (4)..(5): Xaa is C or S
ASPXXVPQDLEPLPIVYY

SEQ ID NO: 8554 - protein, 21 aa, Artificial Sequence
  Cyclic GFR-binding peptide
  MOD_RES (6)..(7): Xaa is C or S
STPPTXXVPTRLEPLTILYYD

SEQ ID NO: 8555 - protein, 24 aa, Artificial Sequence
  Cyclic GFR-binding peptide
  MOD_RES (6)..(7): Xaa is C or S
SIPKAXXVPTELSPISMLFIDEYD

SEQ ID NO: 8556 - protein, 15 aa, Artificial Sequence
  Cyclic GFR-binding peptide
  MOD_RES (1)..(2): Xaa is C or S
XXVPTRLSAISILYL

SEQ ID NO: 8557 - protein, 21 aa, Artificial Sequence
  Cyclic GFR-binding peptide
  MOD_RES (7)..(7): Xaa is C or S
HVTKPTXAPTKLSPISVLFID

SEQ ID NO: 8558 - protein, 17 aa, Artificial Sequence
  Cyclic GFR-binding peptide
RLEPLTILYYDSANNVV

SEQ ID NO: 8559 - protein, 24 aa, Artificial Sequence
  Cyclic GFR-binding peptide
  MOD_RES (6)..(7): Xaa is C or S
YVPKPXXAPTKLEPLTVLYYDDSS

SEQ ID NO: 8560 - protein, 15 aa, Artificial Sequence
  Cyclic GFR-binding peptide
  MOD_RES (1)..(2): Xaa is C or S
XXVPTRLNAISILYF

SEQ ID NO: 8561 - protein, 22 aa, Artificial Sequence
  Cyclic GFR-binding peptide
  MOD_RES (6)..(7): Xaa is C or S
STPPTXXVPTRLEPLTILYYDS

SEQ ID NO: 8562 - protein, 25 aa, Artificial Sequence
  Cyclic GFR-binding peptide
  MOD_RES (7)..(7): Xaa is C or S
HVTKPTXAPTKLEPLPVVYYDDSSN

SEQ ID NO: 8563 - protein, 15 aa, Artificial Sequence
  Cyclic GFR-binding peptide
EPLPVVYYDDSSNVI

SEQ ID NO: 8564 - protein, 20 aa, Artificial Sequence
  Cyclic GFR-binding peptide
  MOD_RES (6)..(7): Xaa is C or S
KIPKAXXVPTELEPLPMVYY

SEQ ID NO: 8565 - protein, 27 aa, Artificial Sequence
  Cyclic GFR-binding peptide
  MOD_RES (7)..(7): Xaa is C or S
HVTKPTXAPTKLEPLTVLYYDDSSNVI

SEQ ID NO: 8566 - protein, 21 aa, Artificial Sequence
  Cyclic GFR-binding peptide
  MOD_RES (7)..(7): Xaa is C or S
HVTKPTXAPTKLEPLPVVYYD

SEQ ID NO: 8567 - protein, 23 aa, Artificial Sequence
  Cyclic GFR-binding peptide
  MOD_RES (6)..(7): Xaa is C or S
YVPKPXXAPTKLSPISVLFIDDS

SEQ ID NO: 8568 - protein, 16 aa, Artificial Sequence
  Cyclic GFR-binding peptide
LNAISILYFDSANNVV

SEQ ID NO: 8569 - protein, 16 aa, Artificial Sequence
  Cyclic GFR-binding peptide
LEPLPIVYYIGKTPKI

SEQ ID NO: 8570 - protein, 15 aa, Artificial Sequence
  Cyclic GFR-binding peptide
  MOD_RES (1)..(2): Xaa is C or S
XXAPTKLEPLTVLYY

SEQ ID NO: 8571 - protein, 25 aa, Artificial Sequence
  Cyclic GFR-binding peptide
  MOD_RES (7)..(7): Xaa is C or S
HVTKPTXAPTKLSPISVLFIDDSSN

SEQ ID NO: 8572 - protein, 20 aa, Artificial Sequence
  Cyclic GFR-binding peptide
  MOD_RES (7)..(7): Xaa is C or S
HVTKPTXAPTKLEPLTVLYY

SEQ ID NO: 8573 - protein, 26 aa, Artificial Sequence
  Cyclic GFR-binding peptide
  MOD_RES (6)..(7): Xaa is C or S
ASAAPXXVPQALSPISILFIVGRKPK

SEQ ID NO: 8574 - protein, 14 aa, Artificial Sequence
  Cyclic GFR-binding peptide
  MOD_RES (1)..(1): Xaa is C or S
XAPTKLEPLPVVYY

SEQ ID NO: 8575 - protein, 18 aa, Artificial Sequence
  Cyclic GFR-binding peptide
TELEPLTMLYYDEYDKVV

SEQ ID NO: 8576 - protein, 16 aa, Artificial Sequence
  Cyclic GFR-binding peptide
  MOD_RES (2)..(3): Xaa is C or S
TXXVPTRLEPLPIVYY

SEQ ID NO: 8577 - protein, 15 aa, Artificial Sequence
  Cyclic GFR-binding peptide
EPLTILYYDSANNVV

SEQ ID NO: 8578 - protein, 16 aa, Artificial Sequence
  Cyclic GFR-binding peptide
  MOD_RES (2)..(3): Xaa is C or S
PXXAPTQLEPLTVLYY

SEQ ID NO: 8579 - protein, 17 aa, Artificial Sequence
  Cyclic GFR-binding peptide
KLEPLTVLYYDDSSNVI

SEQ ID NO: 8580 - protein, 17 aa, Artificial Sequence
  Cyclic GFR-binding peptide
ELEPLPMVYYDEYDKVV

SEQ ID NO: 8581 - protein, 19 aa, Artificial Sequence
  Cyclic GFR-binding peptide
  MOD_RES (6)..(6): Xaa is C or S
VTKPTXAPTKLEPLPVVYY

SEQ ID NO: 8582 - protein, 25 aa, Artificial Sequence
  Cyclic GFR-binding peptide
  MOD_RES (6)..(7): Xaa is C or S
STPPTXXVPTRLEPLPIVYYDSANN

SEQ ID NO: 8583 - protein, 23 aa, Artificial Sequence
  Cyclic GFR-binding peptide
  MOD_RES (6)..(7): Xaa is C or S
TVPKPXXAPTQLSPISVLFIDDS

SEQ ID NO: 8584 - protein, 17 aa, Artificial Sequence
  Cyclic GFR-binding peptide
QLEPLTVLYYDDSSNVI

SEQ ID NO: 8585 - protein, 27 aa, Artificial Sequence
  Cyclic GFR-binding peptide
  MOD_RES (6)..(7): Xaa is C or S
SIPKAXXVPTELEPLTMLYYDEYDKVV

SEQ ID NO: 8586 - protein, 22 aa, Artificial Sequence
  Cyclic GFR-binding peptide
  MOD_RES (6)..(7): Xaa is C or S
TVPKPXXAPTQLSPISVLFIDD

SEQ ID NO: 8587 - protein, 22 aa, Artificial Sequence
  Cyclic GFR-binding peptide
  MOD_RES (6)..(7): Xaa is C or S
ASASPXXVPQDLSPISILFIVG

SEQ ID NO: 8588 - protein, 22 aa, Artificial Sequence
  Cyclic GFR-binding peptide
  MOD_RES (6)..(7): Xaa is C or S
YVPKPXXAPTKLSPISVLFIDD

SEQ ID NO: 8589 - protein, 28 aa, Artificial Sequence
  Cyclic GFR-binding peptide
  MOD_RES (24)..(24): Xaa is C or S
KPKKRVYEIKRVQVPRHHVRSPQXKVSS

SEQ ID NO: 8590 - protein, 13 aa, Artificial Sequence
  Cyclic GFR-binding peptide
VKAVKVSRLQVQT

SEQ ID NO: 8591 - protein, 13 aa, Artificial Sequence
  Cyclic GFR-binding peptide
IKRMQVPRQGTPV

SEQ ID NO: 8592 - protein, 23 aa, Artificial Sequence
  Cyclic GFR-binding peptide
  MOD_RES (19)..(19): Xaa is C or S
VIEMIQVTINSLQVQTPRXQVNR

SEQ ID NO: 8593 - protein, 19 aa, Artificial Sequence
  Cyclic GFR-binding peptide
  MOD_RES (14)..(14): Xaa is C or S
IKRMQVPRQGTPVXELGED

SEQ ID NO: 8594 - protein, 18 aa, Artificial Sequence
  Cyclic GFR-binding peptide
HQGQHPKIRIKRMQVPRE

SEQ ID NO: 8595 - protein, 25 aa, Artificial Sequence
  Cyclic GFR-binding peptide
  MOD_RES (19)..(19): Xaa is C or S
HPKIRVKAMKVSRQGTPVXELGEDN

SEQ ID NO: 8596 - protein, 28 aa, Artificial Sequence
  Cyclic GFR-binding peptide
  MOD_RES (24)..(24): Xaa is C or S
KPKKRVYEMIQVTINSHHVRSPQXKVSS

SEQ ID NO: 8597 - protein, 16 aa, Artificial Sequence
  Cyclic GFR-binding peptide
  MOD_RES (14)..(14): Xaa is C or S
VKAMKVSRQGTPVXEL

SEQ ID NO: 8598 - protein, 29 aa, Artificial Sequence
  Cyclic GFR-binding peptide
  MOD_RES (23)..(23): Xaa is C or S
HQGQHPKIRVKAMKVSREETPVXELGEDN

SEQ ID NO: 8599 - protein, 19 aa, Artificial Sequence
  Cyclic GFR-binding peptide
HQGQHPKIRIKRMQVPREE

SEQ ID NO: 8600 - protein, 22 aa, Artificial Sequence
  Cyclic GFR-binding peptide
  MOD_RES (18)..(18): Xaa is C or S
YEIKRVQVPRHHVRSPQXKVSS

SEQ ID NO: 8601 - protein, 13 aa, Artificial Sequence
  Cyclic GFR-binding peptide
MIQVTINSLQVQT

SEQ ID NO: 8602 - protein, 19 aa, Artificial Sequence
  Cyclic GFR-binding peptide
  MOD_RES (14)..(14): Xaa is C or S
VKAMKVSREETPVXELGED

SEQ ID NO: 8603 - protein, 17 aa, Artificial Sequence
  Cyclic GFR-binding peptide
LKPKKRVYEIKRVQVPR

SEQ ID NO: 8604 - protein, 13 aa, Artificial Sequence
  Cyclic GFR-binding peptide
VKAMKVSREETPV

SEQ ID NO: 8605 - protein, 28 aa, Artificial Sequence
  Cyclic GFR-binding peptide
  MOD_RES (22)..(22): Xaa is C or S
QGQHPKIRIKRMQVPREETPVXELGEDN

SEQ ID NO: 8606 - protein, 21 aa, Artificial Sequence
  Cyclic GFR-binding peptide
LKPKKRVYEIKRVQVPRHHVR

SEQ ID NO: 8607 - protein, 16 aa, Artificial Sequence
  Cyclic GFR-binding peptide
  MOD_RES (16)..(16): Xaa is C or S
MIQVTINSLQVQTPRX

SEQ ID NO: 8608 - protein, 14 aa, Artificial Sequence
  Cyclic GFR-binding peptide
MIQVTINSHHVRSP

SEQ ID NO: 8609 - protein, 20 aa, Artificial Sequence
  Cyclic GFR-binding peptide
LKPKKRVYEIKRVQVPRHHV

SEQ ID NO: 8610 - protein, 20 aa, Artificial Sequence
  Cyclic GFR-binding peptide
HQGQHPKIRVKAMKVSRQGT

SEQ ID NO: 8611 - protein, 22 aa, Artificial Sequence
  Cyclic GFR-binding peptide
  MOD_RES (18)..(18): Xaa is C or S
IEMIQVTINSLQVQTPRXQVNR

SEQ ID NO: 8612 - protein, 17 aa, Artificial Sequence
  Cyclic GFR-binding peptide
HQGQHPKIRVKAMKVSR

SEQ ID NO: 8613 - protein, 15 aa, Artificial Sequence
  Cyclic GFR-binding peptide
  MOD_RES (14)..(14): Xaa is C or S
VKAMKVSRQGTPVXE

SEQ ID NO: 8614 - protein, 21 aa, Artificial Sequence
  Cyclic GFR-binding peptide
HQGQHPKIRVKAMKVSRQGTP

SEQ ID NO: 8615 - protein, 28 aa, Artificial Sequence
  Cyclic GFR-binding peptide
  MOD_RES (22)..(22): Xaa is C or S
QGQHPKIRVKAMKVSRQGTPVXELGEDN

SEQ ID NO: 8616 - protein, 20 aa, Artificial Sequence
  Cyclic GFR-binding peptide
  MOD_RES (16)..(16): Xaa is C or S
IKRVQVPRHHVRSPQXKVSS

SEQ ID NO: 8617 - protein, 20 aa, Artificial Sequence
  Cyclic GFR-binding peptide
HQGQHPKIRIKRMQVPREET

SEQ ID NO: 8618 - protein, 15 aa, Artificial Sequence
  Cyclic GFR-binding peptide
  MOD_RES (14)..(14): Xaa is C or S
VKAMKVSREETPVXE

SEQ ID NO: 8619 - protein, 28 aa, Artificial Sequence
  Cyclic GFR-binding peptide
  MOD_RES (24)..(24): Xaa is C or S
IPKKRVIEVKAVKVSRLQVQTPRXQVNR

SEQ ID NO: 8620 - protein, 14 aa, Artificial Sequence
  Cyclic GFR-binding peptide
  MOD_RES (14)..(14): Xaa is C or S
IKRMQVPREETPVX

SEQ ID NO: 8621 - protein, 27 aa, Artificial Sequence
  Cyclic GFR-binding peptide
  MOD_RES (23)..(23): Xaa is C or S
PKKRVYEMIQVTINSHHVRSPQXKVSS

SEQ ID NO: 8622 - protein, 19 aa, Artificial Sequence
  Cyclic GFR-binding peptide
FIPKKRVIEMIQVTINSLQ

SEQ ID NO: 8623 - protein, 26 aa, Artificial Sequence
  Cyclic GFR-binding peptide
  MOD_RES (20)..(20): Xaa is C or S
QHPKIRVKAMKVSREETPVXELGEDN

SEQ ID NO: 8624 - protein, 15 aa, Artificial Sequence
  Cyclic GFR-binding peptide
MIQVTINSHHVRSPQ

SEQ ID NO: 8625 - protein, 21 aa, Artificial Sequence
  Cyclic GFR-binding peptide
  MOD_RES (17)..(17): Xaa is C or S
EVKAVKVSRLQVQTPRXQVNR

SEQ ID NO: 8626 - protein, 19 aa, Artificial Sequence
  Cyclic GFR-binding peptide
  MOD_RES (16)..(16): Xaa is C or S
VKAVKVSRLQVQTPRXQVN

SEQ ID NO: 8627 - protein, 21 aa, Artificial Sequence
  Cyclic GFR-binding peptide
HQGQHPKIRIKRMQVPRQGTP

SEQ ID NO: 8628 - protein, 29 aa, Artificial Sequence
  Cyclic GFR-binding peptide
  MOD_RES (25)..(25): Xaa is C or S
FIPKKRVIEMIQVTINSLQVQTPRXQVNR

SEQ ID NO: 8629 - protein, 16 aa, Artificial Sequence
  Cyclic GFR-binding peptide
  MOD_RES (14)..(14): Xaa is C or S
IKRMQVPRQGTPVXEL

SEQ ID NO: 8630 - protein, 14 aa, Artificial Sequence
  Cyclic GFR-binding peptide
MIQVTINSLQVQTP

SEQ ID NO: 8631 - protein, 21 aa, Artificial Sequence
  Cyclic GFR-binding peptide
HQGQHPKIRVKAMKVSREETP

SEQ ID NO: 8632 - protein, 22 aa, Artificial Sequence
  Cyclic GFR-binding peptide
  MOD_RES (18)..(18): Xaa is C or S
YEMIQVTINSHHVRSPQXKVSS

SEQ ID NO: 8633 - protein, 27 aa, Artificial Sequence
  Cyclic GFR-binding peptide
  MOD_RES (23)..(23): Xaa is C or S
PKKRVYEIKRVQVPRHHVRSPQXKVSS

SEQ ID NO: 8634 - protein, 21 aa, Artificial Sequence
  Cyclic GFR-binding peptide
  MOD_RES (17)..(17): Xaa is C or S
EMIQVTINSLQVQTPRXQVNR

SEQ ID NO: 8635 - protein, 13 aa, Artificial Sequence
  Cyclic GFR-binding peptide
VKAMKVSRQGTPV

SEQ ID NO: 8636 - protein, 21 aa, Artificial Sequence
  Cyclic GFR-binding peptide
  MOD_RES (15)..(15): Xaa is C or S
RIKRMQVPRQGTPVXELGEDN

SEQ ID NO: 8637 - protein, 18 aa, Artificial Sequence
  Cyclic GFR-binding peptide
  MOD_RES (14)..(14): Xaa is C or S
VKAMKVSRQGTPVXELGE

SEQ ID NO: 8638 - protein, 18 aa, Artificial Sequence
  Cyclic GFR-binding peptide
HQGQHPKIRVKAMKVSRQ

SEQ ID NO: 8639 - protein, 20 aa, Artificial Sequence
  Cyclic GFR-binding peptide
FIPKKRVIEVKAVKVSRLQV

SEQ ID NO: 8640 - protein, 23 aa, Artificial Sequence
  Cyclic GFR-binding peptide
  MOD_RES (19)..(19): Xaa is C or S
VYEIKRVQVPRHHVRSPQXKVSS

SEQ ID NO: 8641 - protein, 23 aa, Artificial Sequence
  Cyclic GFR-binding peptide
  MOD_RES (19)..(19): Xaa is C or S
VYEMIQVTINSHHVRSPQXKVSS

SEQ ID NO: 8642 - protein, 29 aa, Artificial Sequence
  Cyclic GFR-binding peptide
  MOD_RES (23)..(23): Xaa is C or S
HQGQHPKIRIKRMQVPREETPVXELGEDN

SEQ ID NO: 8643 - protein, 29 aa, Artificial Sequence
  Cyclic GFR-binding peptide
  MOD_RES (25)..(25): Xaa is C or S
FIPKKRVIEVKAVKVSRLQVQTPRXQVNR

SEQ ID NO: 8644 - protein, 25 aa, Artificial Sequence
  Cyclic GFR-binding peptide
  MOD_RES (21)..(21): Xaa is C or S
KRVIEVKAVKVSRLQVQTPRXQVNR

SEQ ID NO: 8645 - protein, 22 aa, Artificial Sequence
  Cyclic GFR-binding peptide
  MOD_RES (16)..(16): Xaa is C or S
IRIKRMQVPREETPVXELGEDN

SEQ ID NO: 8646 - protein, 20 aa, Artificial Sequence
  Cyclic GFR-binding peptide
  MOD_RES (14)..(14): Xaa is C or S
VKAMKVSRQGTPVXELGEDN

SEQ ID NO: 8647 - protein, 17 aa, Artificial Sequence
  Cyclic GFR-binding peptide
  MOD_RES (14)..(14): Xaa is C or S
VKAMKVSRQGTPVXELG

SEQ ID NO: 8648 - protein, 18 aa, Artificial Sequence
  Cyclic GFR-binding peptide
HQGQHPKIRVKAMKVSRE

SEQ ID NO: 8649 - protein, 25 aa, Artificial Sequence
  Cyclic GFR-binding peptide
  MOD_RES (21)..(21): Xaa is C or S
KRVIEMIQVTINSLQVQTPRXQVNR

SEQ ID NO: 8650 - protein, 18 aa, Artificial Sequence
  Cyclic GFR-binding peptide
  MOD_RES (16)..(16): Xaa is C or S
IKRVQVPRHHVRSPQXKV

SEQ ID NO: 8651 - protein, 17 aa, Artificial Sequence
  Cyclic GFR-binding peptide
  MOD_RES (16)..(16): Xaa is C or S
IKRVQVPRHHVRSPQXK

SEQ ID NO: 8652 - protein, 26 aa, Artificial Sequence
  Cyclic GFR-binding peptide
  MOD_RES (20)..(20): Xaa is C or S
QHPKIRIKRMQVPRQGTPVXELGEDN

SEQ ID NO: 8653 - protein, 17 aa, Artificial Sequence
  Cyclic GFR-binding peptide
  MOD_RES (14)..(14): Xaa is C or S
VKAMKVSREETPVXELG

SEQ ID NO: 8654 - protein, 19 aa, Artificial Sequence
  Cyclic GFR-binding peptide
HQGQHPKIRVKAMKVSREE

SEQ ID NO: 8655 - protein, 18 aa, Artificial Sequence
  Cyclic GFR-binding peptide
  MOD_RES (14)..(14): Xaa is C or S
VKAMKVSREETPVXELGE

SEQ ID NO: 8656 - protein, 16 aa, Artificial Sequence
  Cyclic GFR-binding peptide
  MOD_RES (16)..(16): Xaa is C or S
IKRVQVPRHHVRSPQX

SEQ ID NO: 8657 - protein, 29 aa, Artificial Sequence
  Cyclic GFR-binding peptide
  MOD_RES (25)..(25): Xaa is C or S
LKPKKRVYEMIQVTINSHHVRSPQXKVSS

SEQ ID NO: 8658 - protein, 29 aa, Artificial Sequence
  Cyclic GFR-binding peptide
  MOD_RES (25)..(25): Xaa is C or S
LKPKKRVYEIKRVQVPRHHVRSPQXKVSS

SEQ ID NO: 8659 - protein, 19 aa, Artificial Sequence
  Cyclic GFR-binding peptide
FIPKKRVIEVKAVKVSRLQ

SEQ ID NO: 8660 - protein, 22 aa, Artificial Sequence
  Cyclic GFR-binding peptide
  MOD_RES (16)..(16): Xaa is C or S
IRIKRMQVPRQGTPVXELGEDN

SEQ ID NO: 8661 - protein, 20 aa, Artificial Sequence
  Cyclic GFR-binding peptide
HQGQHPKIRIKRMQVPRQGT

SEQ ID NO: 8662 - protein, 18 aa, Artificial Sequence
  Cyclic GFR-binding peptide
  MOD_RES (16)..(16): Xaa is C or S
MIQVTINSLQVQTPRXQV

SEQ ID NO: 8663 - protein, 19 aa, Artificial Sequence
  Cyclic GFR-binding peptide
LKPKKRVYEMIQVTINSHH

SEQ ID NO: 8664 - protein, 14 aa, Artificial Sequence
  Cyclic GFR-binding peptide
IKRVQVPRHHVRSP

SEQ ID NO: 8665 - protein, 26 aa, Artificial Sequence
  Cyclic GFR-binding peptide
  MOD_RES (20)..(20): Xaa is C or S
QHPKIRIKRMQVPREETPVXELGEDN

SEQ ID NO: 8666 - protein, 21 aa, Artificial Sequence
  Cyclic GFR-binding peptide
  MOD_RES (17)..(17): Xaa is C or S
EIKRVQVPRHHVRSPQXKVSS

SEQ ID NO: 8667 - protein, 17 aa, Artificial Sequence
  Cyclic GFR-binding peptide
HQGQHPKIRIKRMQVPR

SEQ ID NO: 8668 - protein, 23 aa, Artificial Sequence
  Cyclic GFR-binding peptide
  MOD_RES (17)..(17): Xaa is C or S
KIRVKAMKVSREETPVXELGEDN

SEQ ID NO: 8669 - protein, 14 aa, Artificial Sequence
  Cyclic GFR-binding peptide
  MOD_RES (14)..(14): Xaa is C or S
VKAMKVSREETPVX

SEQ ID NO: 8670 - protein, 27 aa, Artificial Sequence
  Cyclic GFR-binding peptide
  MOD_RES (21)..(21): Xaa is C or S
GQHPKIRIKRMQVPRQGTPVXELGEDN

SEQ ID NO: 8671 - protein, 29 aa, Artificial Sequence
  Cyclic GFR-binding peptide
  MOD_RES (23)..(23): Xaa is C or S
HQGQHPKIRVKAMKVSRQGTPVXELGEDN

SEQ ID NO: 8672 - protein, 15 aa, Artificial Sequence
  Cyclic GFR-binding peptide
MIQVTINSLQVQTPR

SEQ ID NO: 8673 - protein, 26 aa, Artificial Sequence
  Cyclic GFR-binding peptide
  MOD_RES (22)..(22): Xaa is C or S
KKRVIEVKAVKVSRLQVQTPRXQVNR

SEQ ID NO: 8674 - protein, 15 aa, Artificial Sequence
  Cyclic GFR-binding peptide
VKAVKVSRLQVQTPR

SEQ ID NO: 8675 - protein, 20 aa, Artificial Sequence
  Cyclic GFR-binding peptide
  MOD_RES (16)..(16): Xaa is C or S
MIQVTINSLQVQTPRXQVNR

SEQ ID NO: 8676 - protein, 25 aa, Artificial Sequence
  Cyclic GFR-binding peptide
  MOD_RES (19)..(19): Xaa is C or S
HPKIRIKRMQVPRQGTPVXELGEDN

SEQ ID NO: 8677 - protein, 21 aa, Artificial Sequence
  Cyclic GFR-binding peptide
  MOD_RES (15)..(15): Xaa is C or S
RIKRMQVPREETPVXELGEDN

SEQ ID NO: 8678 - protein, 15 aa, Artificial Sequence
  Cyclic GFR-binding peptide
IKRVQVPRHHVRSPQ

SEQ ID NO: 8679 - protein, 14 aa, Artificial Sequence
  Cyclic GFR-binding peptide
  MOD_RES (14)..(14): Xaa is C or S
IKRMQVPRQGTPVX

SEQ ID NO: 8680 - protein, 19 aa, Artificial Sequence
  Cyclic GFR-binding peptide
  MOD_RES (16)..(16): Xaa is C or S
IKRVQVPRHHVRSPQXKVS

SEQ ID NO: 8681 - protein, 20 aa, Artificial Sequence
  Cyclic GFR-binding peptide
  MOD_RES (16)..(16): Xaa is C or S
VKAVKVSRLQVQTPRXQVNR

SEQ ID NO: 8682 - protein, 17 aa, Artificial Sequence
  Cyclic GFR-binding peptide
  MOD_RES (14)..(14): Xaa is C or S
IKRMQVPREETPVXELG

SEQ ID NO: 8683 - protein, 21 aa, Artificial Sequence
  Cyclic GFR-binding peptide
LKPKKRVYEMIQVTINSHHVR

SEQ ID NO: 8684 - protein, 27 aa, Artificial Sequence
  Cyclic GFR-binding peptide
  MOD_RES (21)..(21): Xaa is C or S
GQHPKIRVKAMKVSRQGTPVXELGEDN

SEQ ID NO: 8685 - protein, 20 aa, Artificial Sequence
  Cyclic GFR-binding peptide
HQGQHPKIRVKAMKVSREET

SEQ ID NO: 8686 - protein, 20 aa, Artificial Sequence
  Cyclic GFR-binding peptide
  MOD_RES (14)..(14): Xaa is C or S
VKAMKVSREETPVXELGEDN

SEQ ID NO: 8687 - protein, 16 aa, Artificial Sequence
  Cyclic GFR-binding peptide
  MOD_RES (14)..(14): Xaa is C or S
IKRMQVPREETPVXEL

SEQ ID NO: 8688 - protein, 17 aa, Artificial Sequence
  Cyclic GFR-binding peptide
LKPKKRVYEMIQVTINS

SEQ ID NO: 8689 - protein, 18 aa, Artificial Sequence
  Cyclic GFR-binding peptide
  MOD_RES (16)..(16): Xaa is C or S
VKAVKVSRLQVQTPRXQV

SEQ ID NO: 8690 - protein, 17 aa, Artificial Sequence
  Cyclic GFR-binding peptide
  MOD_RES (16)..(16): Xaa is C or S
MIQVTINSHHVRSPQXK

SEQ ID NO: 8691 - protein, 17 aa, Artificial Sequence
  Cyclic GFR-binding peptide
FIPKKRVIEVKAVKVSR

SEQ ID NO: 8692 - protein, 26 aa, Artificial Sequence
  Cyclic GFR-binding peptide
  MOD_RES (20)..(20): Xaa is C or S
QHPKIRVKAMKVSRQGTPVXELGEDN

SEQ ID NO: 8693 - protein, 23 aa, Artificial Sequence
  Cyclic GFR-binding peptide
  MOD_RES (17)..(17): Xaa is C or S
KIRIKRMQVPREETPVXELGEDN

SEQ ID NO: 8694 - protein, 22 aa, Artificial Sequence
  Cyclic GFR-binding peptide
  MOD_RES (16)..(16): Xaa is C or S
IRVKAMKVSRQGTPVXELGEDN

SEQ ID NO: 8695 - protein, 21 aa, Artificial Sequence
  Cyclic GFR-binding peptide
HQGQHPKIRIKRMQVPREETP

SEQ ID NO: 8696 - protein, 25 aa, Artificial Sequence
  Cyclic GFR-binding peptide
  MOD_RES (19)..(19): Xaa is C or S
HPKIRIKRMQVPREETPVXELGEDN

SEQ ID NO: 8697 - protein, 18 aa, Artificial Sequence
  Cyclic GFR-binding peptide
HQGQHPKIRIKRMQVPRQ

SEQ ID NO: 8698 - protein, 27 aa, Artificial Sequence
  Cyclic GFR-binding peptide
  MOD_RES (23)..(23): Xaa is C or S
PKKRVIEMIQVTINSLQVQTPRXQVNR

SEQ ID NO: 8699 - protein, 23 aa, Artificial Sequence
  Cyclic GFR-binding peptide
  MOD_RES (17)..(17): Xaa is C or S
KIRVKAMKVSRQGTPVXELGEDN

SEQ ID NO: 8700 - protein, 28 aa, Artificial Sequence
  Cyclic GFR-binding peptide
  MOD_RES (22)..(22): Xaa is C or S
QGQHPKIRIKRMQVPRQGTPVXELGEDN

SEQ ID NO: 8701 - protein, 23 aa, Artificial Sequence
  Cyclic GFR-binding peptide
  MOD_RES (17)..(17): Xaa is C or S
KIRIKRMQVPRQGTPVXELGEDN

SEQ ID NO: 8702 - protein, 19 aa, Artificial Sequence
  Cyclic GFR-binding peptide
  MOD_RES (14)..(14): Xaa is C or S
VKAMKVSRQGTPVXELGED

SEQ ID NO: 8703 - protein, 13 aa, Artificial Sequence
  Cyclic GFR-binding peptide
MIQVTINSHHVRS

SEQ ID NO: 8704 - protein, 21 aa, Artificial Sequence
  Cyclic GFR-binding peptide
  MOD_RES (15)..(15): Xaa is C or S
RVKAMKVSRQGTPVXELGEDN

SEQ ID NO: 8705 - protein, 19 aa, Artificial Sequence
  Cyclic GFR-binding peptide
HQGQHPKIRIKRMQVPRQG

SEQ ID NO: 8706 - protein, 20 aa, Artificial Sequence
  Cyclic GFR-binding peptide
  MOD_RES (16)..(16): Xaa is C or S
MIQVTINSHHVRSPQXKVSS

SEQ ID NO: 8707 - protein, 21 aa, Artificial Sequence
  Cyclic GFR-binding peptide
FIPKKRVIEVKAVKVSRLQVQ

SEQ ID NO: 8708 - protein, 20 aa, Artificial Sequence
  Cyclic GFR-binding peptide
LKPKKRVYEMIQVTINSHHV

SEQ ID NO: 8709 - protein, 18 aa, Artificial Sequence
  Cyclic GFR-binding peptide
FIPKKRVIEMIQVTINSL

SEQ ID NO: 8710 - protein, 14 aa, Artificial Sequence
  Cyclic GFR-binding peptide
  MOD_RES (14)..(14): Xaa is C or S
VKAMKVSRQGTPVX

SEQ ID NO: 8711 - protein, 19 aa, Artificial Sequence
  Cyclic GFR-binding peptide
  MOD_RES (14)..(14): Xaa is C or S
IKRMQVPREETPVXELGED

SEQ ID NO: 8712 - protein, 21 aa, Artificial Sequence
  Cyclic GFR-binding peptide
  MOD_RES (17)..(17): Xaa is C or S
EMIQVTINSHHVRSPQXKVSS

SEQ ID NO: 8713 - protein, 13 aa, Artificial Sequence
  Cyclic GFR-binding peptide
IKRMQVPREETPV

SEQ ID NO: 8714 - protein, 18 aa, Artificial Sequence
  Cyclic GFR-binding peptide
  MOD_RES (16)..(16): Xaa is C or S
MIQVTINSHHVRSPQXKV

SEQ ID NO: 8715 - protein, 27 aa, Artificial Sequence
  Cyclic GFR-binding peptide
  MOD_RES (21)..(21): Xaa is C or S
GQHPKIRVKAMKVSREETPVXELGEDN

SEQ ID NO: 8716 - protein, 22 aa, Artificial Sequence
  Cyclic GFR-binding peptide
  MOD_RES (16)..(16): Xaa is C or S
IRVKAMKVSREETPVXELGEDN

SEQ ID NO: 8717 - protein, 28 aa, Artificial Sequence
  Cyclic GFR-binding peptide
  MOD_RES (24)..(24): Xaa is C or S
IPKKRVIEMIQVTINSLQVQTPRXQVNR

SEQ ID NO: 8718 - protein, 16 aa, Artificial Sequence
  Cyclic GFR-binding peptide
  MOD_RES (16)..(16): Xaa is C or S
VKAVKVSRLQVQTPRX

SEQ ID NO: 8719 - protein, 14 aa, Artificial Sequence
  Cyclic GFR-binding peptide
VKAVKVSRLQVQTP

SEQ ID NO: 8720 - protein, 13 aa, Artificial Sequence
  Cyclic GFR-binding peptide
IKRVQVPRHHVRS

SEQ ID NO: 8721 - protein, 27 aa, Artificial Sequence
  Cyclic GFR-binding peptide
  MOD_RES (21)..(21): Xaa is C or S
GQHPKIRIKRMQVPREETPVXELGEDN

SEQ ID NO: 8722 - protein, 21 aa, Artificial Sequence
  Cyclic GFR-binding peptide
  MOD_RES (15)..(15): Xaa is C or S
RVKAMKVSREETPVXELGEDN

SEQ ID NO: 8723 - protein, 23 aa, Artificial Sequence
  Cyclic GFR-binding peptide
  MOD_RES (19)..(19): Xaa is C or S
VIEVKAVKVSRLQVQTPRXQVNR

SEQ ID NO: 8724 - protein, 25 aa, Artificial Sequence
  Cyclic GFR-binding peptide
  MOD_RES (21)..(21): Xaa is C or S
KRVYEIKRVQVPRHHVRSPQXKVSS

SEQ ID NO: 8725 - protein, 22 aa, Artificial Sequence
  Cyclic GFR-binding peptide
  MOD_RES (18)..(18): Xaa is C or S
IEVKAVKVSRLQVQTPRXQVNR

SEQ ID NO: 8726 - protein, 26 aa, Artificial Sequence
  Cyclic GFR-binding peptide
  MOD_RES (22)..(22): Xaa is C or S
KKRVYEMIQVTINSHHVRSPQXKVSS

SEQ ID NO: 8727 - protein, 17 aa, Artificial Sequence
  Cyclic GFR-binding peptide
  MOD_RES (16)..(16): Xaa is C or S
MIQVTINSLQVQTPRXQ

SEQ ID NO: 8728 - protein, 25 aa, Artificial Sequence
  Cyclic GFR-binding peptide
  MOD_RES (21)..(21): Xaa is C or S
KRVYEMIQVTINSHHVRSPQXKVSS

SEQ ID NO: 8729 - protein, 18 aa, Artificial Sequence
  Cyclic GFR-binding peptide
  MOD_RES (14)..(14): Xaa is C or S
IKRMQVPREETPVXELGE

SEQ ID NO: 8730 - protein, 20 aa, Artificial Sequence
  Cyclic GFR-binding peptide
FIPKKRVIEMIQVTINSLQV

SEQ ID NO: 8731 - protein, 18 aa, Artificial Sequence
  Cyclic GFR-binding peptide
  MOD_RES (14)..(14): Xaa is C or S
IKRMQVPRQGTPVXELGE

SEQ ID NO: 8732 - protein, 20 aa, Artificial Sequence
  Cyclic GFR-binding peptide
  MOD_RES (14)..(14): Xaa is C or S
IKRMQVPRQGTPVXELGEDN

SEQ ID NO: 8733 - protein, 17 aa, Artificial Sequence
  Cyclic GFR-binding peptide
  MOD_RES (16)..(16): Xaa is C or S
VKAVKVSRLQVQTPRXQ

SEQ ID NO: 8734 - protein, 29 aa, Artificial Sequence
  Cyclic GFR-binding peptide
  MOD_RES (23)..(23): Xaa is C or S
HQGQHPKIRIKRMQVPRQGTPVXELGEDN

SEQ ID NO: 8735 - protein, 25 aa, Artificial Sequence
  Cyclic GFR-binding peptide
  MOD_RES (19)..(19): Xaa is C or S
HPKIRVKAMKVSREETPVXELGEDN

SEQ ID NO: 8736 - protein, 15 aa, Artificial Sequence
  Cyclic GFR-binding peptide
  MOD_RES (14)..(14): Xaa is C or S
IKRMQVPRQGTPVXE

SEQ ID NO: 8737 - protein, 26 aa, Artificial Sequence
  Cyclic GFR-binding peptide
  MOD_RES (22)..(22): Xaa is C or S
KKRVYEIKRVQVPRHHVRSPQXKVSS

SEQ ID NO: 8738 - protein, 20 aa, Artificial Sequence
  Cyclic GFR-binding peptide
  MOD_RES (14)..(14): Xaa is C or S
IKRMQVPREETPVXELGEDN

SEQ ID NO: 8739 - protein, 19 aa, Artificial Sequence
  Cyclic GFR-binding peptide
LKPKKRVYEIKRVQVPRHH

SEQ ID NO: 8740 - protein, 17 aa, Artificial Sequence
  Cyclic GFR-binding peptide
  MOD_RES (14)..(14): Xaa is C or S
IKRMQVPRQGTPVXELG

SEQ ID NO: 8741 - protein, 19 aa, Artificial Sequence
  Cyclic GFR-binding peptide
  MOD_RES (16)..(16): Xaa is C or S
MIQVTINSHHVRSPQXKVS

SEQ ID NO: 8742 - protein, 16 aa, Artificial Sequence
  Cyclic GFR-binding peptide
  MOD_RES (14)..(14): Xaa is C or S
VKAMKVSREETPVXEL

SEQ ID NO: 8743 - protein, 27 aa, Artificial Sequence
  Cyclic GFR-binding peptide
  MOD_RES (23)..(23): Xaa is C or S
PKKRVIEVKAVKVSRLQVQTPRXQVNR

SEQ ID NO: 8744 - protein, 19 aa, Artificial Sequence
  Cyclic GFR-binding peptide
HQGQHPKIRVKAMKVSRQG

SEQ ID NO: 8745 - protein, 19 aa, Artificial Sequence
  Cyclic GFR-binding peptide
  MOD_RES (16)..(16): Xaa is C or S
MIQVTINSLQVQTPRXQVN

SEQ ID NO: 8746 - protein, 16 aa, Artificial Sequence
  Cyclic GFR-binding peptide
  MOD_RES (16)..(16): Xaa is C or S
MIQVTINSHHVRSPQX

SEQ ID NO: 8747 - protein, 26 aa, Artificial Sequence
  Cyclic GFR-binding peptide
  MOD_RES (22)..(22): Xaa is C or S
KKRVIEMIQVTINSLQVQTPRXQVNR

SEQ ID NO: 8748 - protein, 18 aa, Artificial Sequence
  Cyclic GFR-binding peptide
LKPKKRVYEIKRVQVPRH

SEQ ID NO: 8749 - protein, 15 aa, Artificial Sequence
  Cyclic GFR-binding peptide
  MOD_RES (14)..(14): Xaa is C or S
IKRMQVPREETPVXE

SEQ ID NO: 8750 - protein, 21 aa, Artificial Sequence
  Cyclic GFR-binding peptide
FIPKKRVIEMIQVTINSLQVQ

SEQ ID NO: 8751 - protein, 18 aa, Artificial Sequence
  Cyclic GFR-binding peptide
FIPKKRVIEVKAVKVSRL

SEQ ID NO: 8752 - protein, 18 aa, Artificial Sequence
  Cyclic GFR-binding peptide
LKPKKRVYEMIQVTINSH

SEQ ID NO: 8753 - protein, 17 aa, Artificial Sequence
  Cyclic GFR-binding peptide
FIPKKRVIEMIQVTINS

SEQ ID NO: 8754 - protein, 28 aa, Artificial Sequence
  Cyclic GFR-binding peptide
  MOD_RES (22)..(22): Xaa is C or S
QGQHPKIRVKAMKVSREETPVXELGEDN

SEQ ID NO: 8755 - protein, 28 aa, Artificial Sequence
  Cyclic GFR-binding peptide
  MOD_RES (5)..(5): Xaa is C or S
SSVKXQPSRVHHRPVQVRKIEYVRKKPK

SEQ ID NO: 8756 - protein, 13 aa, Artificial Sequence
  Cyclic GFR-binding peptide
TQVQLRSVKVAKV

SEQ ID NO: 8757 - protein, 13 aa, Artificial Sequence
  Cyclic GFR-binding peptide
VPTGQRPVQMRKI

SEQ ID NO: 8758 - protein, 23 aa, Artificial Sequence
  Cyclic GFR-binding peptide
  MOD_RES (5)..(5): Xaa is C or S
RNVQXRPTQVQLSNITVQIMEIV

SEQ ID NO: 8759 - protein, 19 aa, Artificial Sequence
  Cyclic GFR-binding peptide
  MOD_RES (6)..(6): Xaa is C or S
DEGLEXVPTGQRPVQMRKI

SEQ ID NO: 8760 - protein, 18 aa, Artificial Sequence
  Cyclic GFR-binding peptide
ERPVQMRKIRIKPHQGQH

SEQ ID NO: 8761 - protein, 25 aa, Artificial Sequence
  Cyclic GFR-binding peptide
  MOD_RES (7)..(7): Xaa is C or S
NDEGLEXVPTGQRSVKMAKVRIKPH

SEQ ID NO: 8762 - protein, 28 aa, Artificial Sequence
  Cyclic GFR-binding peptide
  MOD_RES (5)..(5): Xaa is C or S
SSVKXQPSRVHHSNITVQIMEYVRKKPK

SEQ ID NO: 8763 - protein, 16 aa, Artificial Sequence
  Cyclic GFR-binding peptide
  MOD_RES (3)..(3): Xaa is C or S
LEXVPTGQRSVKMAKV

SEQ ID NO: 8764 - protein, 29 aa, Artificial Sequence
  Cyclic GFR-binding peptide
  MOD_RES (7)..(7): Xaa is C or S
NDEGLEXVPTEERSVKMAKVRIKPHQGQH

SEQ ID NO: 8765 - protein, 19 aa, Artificial Sequence
  Cyclic GFR-binding peptide
EERPVQMRKIRIKPHQGQH

SEQ ID NO: 8766 - protein, 22 aa, Artificial Sequence
  Cyclic GFR-binding peptide
  MOD_RES (5)..(5): Xaa is C or S
SSVKXQPSRVHHRPVQVRKIEY

SEQ ID NO: 8767 - protein, 13 aa, Artificial Sequence
  Cyclic GFR-binding peptide
TQVQLSNITVQIM

SEQ ID NO: 8768 - protein, 19 aa, Artificial Sequence
  Cyclic GFR-binding peptide
  MOD_RES (6)..(6): Xaa is C or S
DEGLEXVPTEERSVKMAKV

SEQ ID NO: 8769 - protein, 17 aa, Artificial Sequence
  Cyclic GFR-binding peptide
RPVQVRKIEYVRKKPKL

SEQ ID NO: 8770 - protein, 13 aa, Artificial Sequence
  Cyclic GFR-binding peptide
VPTEERSVKMAKV

SEQ ID NO: 8771 - protein, 28 aa, Artificial Sequence
  Cyclic GFR-binding peptide
  MOD_RES (7)..(7): Xaa is C or S
NDEGLEXVPTEERPVQMRKIRIKPHQGQ

SEQ ID NO: 8772 - protein, 21 aa, Artificial Sequence
  Cyclic GFR-binding peptide
RVHHRPVQVRKIEYVRKKPKL

SEQ ID NO: 8773 - protein, 16 aa, Artificial Sequence
  Cyclic GFR-binding peptide
  MOD_RES (1)..(1): Xaa is C or S
XRPTQVQLSNITVQIM

SEQ ID NO: 8774 - protein, 14 aa, Artificial Sequence
  Cyclic GFR-binding peptide
PSRVHHSNITVQIM

SEQ ID NO: 8775 - protein, 20 aa, Artificial Sequence
  Cyclic GFR-binding peptide
VHHRPVQVRKIEYVRKKPKL

SEQ ID NO: 8776 - protein, 20 aa, Artificial Sequence
  Cyclic GFR-binding peptide
TGQRSVKMAKVRIKPHQGQH

SEQ ID NO: 8777 - protein, 22 aa, Artificial Sequence
  Cyclic GFR-binding peptide
  MOD_RES (5)..(5): Xaa is C or S
RNVQXRPTQVQLSNITVQIMEI

SEQ ID NO: 8778 - protein, 17 aa, Artificial Sequence
  Cyclic GFR-binding peptide
RSVKMAKVRIKPHQGQH

SEQ ID NO: 8779 - protein, 15 aa, Artificial Sequence
  Cyclic GFR-binding peptide
  MOD_RES (2)..(2): Xaa is C or S
EXVPTGQRSVKMAKV

SEQ ID NO: 8780 - protein, 21 aa, Artificial Sequence
  Cyclic GFR-binding peptide
PTGQRSVKMAKVRIKPHQGQH

SEQ ID NO: 8781 - protein, 28 aa, Artificial Sequence
  Cyclic GFR-binding peptide
  MOD_RES (7)..(7): Xaa is C or S
NDEGLEXVPTGQRSVKMAKVRIKPHQGQ

SEQ ID NO: 8782 - protein, 20 aa, Artificial Sequence
  Cyclic GFR-binding peptide
  MOD_RES (5)..(5): Xaa is C or S
SSVKXQPSRVHHRPVQVRKI

SEQ ID NO: 8783 - protein, 20 aa, Artificial Sequence
  Cyclic GFR-binding peptide
TEERPVQMRKIRIKPHQGQH

SEQ ID NO: 8784 - protein, 15 aa, Artificial Sequence
  Cyclic GFR-binding peptide
  MOD_RES (2)..(2): Xaa is C or S
EXVPTEERSVKMAKV

SEQ ID NO: 8785 - protein, 28 aa, Artificial Sequence
  Cyclic GFR-binding peptide
  MOD_RES (5)..(5): Xaa is C or S
RNVQXRPTQVQLRSVKVAKVEIVRKKPI

SEQ ID NO: 8786 - protein, 14 aa, Artificial Sequence
  Cyclic GFR-binding peptide
  MOD_RES (1)..(1): Xaa is C or S
XVPTEERPVQMRKI

SEQ ID NO: 8787 - protein, 27 aa, Artificial Sequence
  Cyclic GFR-binding peptide
  MOD_RES (5)..(5): Xaa is C or S
SSVKXQPSRVHHSNITVQIMEYVRKKP

SEQ ID NO: 8788 - protein, 19 aa, Artificial Sequence
  Cyclic GFR-binding peptide
QLSNITVQIMEIVRKKPIF

SEQ ID NO: 8789 - protein, 26 aa, Artificial Sequence
  Cyclic GFR-binding peptide
  MOD_RES (7)..(7): Xaa is C or S
NDEGLEXVPTEERSVKMAKVRIKPHQ

SEQ ID NO: 8790 - protein, 15 aa, Artificial Sequence
  Cyclic GFR-binding peptide
QPSRVHHSNITVQIM

SEQ ID NO: 8791 - protein, 21 aa, Artificial Sequence
  Cyclic GFR-binding peptide
  MOD_RES (5)..(5): Xaa is C or S
RNVQXRPTQVQLRSVKVAKVE

SEQ ID NO: 8792 - protein, 19 aa, Artificial Sequence
  Cyclic GFR-binding peptide
  MOD_RES (4)..(4): Xaa is C or S
NVQXRPTQVQLRSVKVAKV

SEQ ID NO: 8793 - protein, 21 aa, Artificial Sequence
  Cyclic GFR-binding peptide
PTGQRPVQMRKIRIKPHQGQH

SEQ ID NO: 8794 - protein, 29 aa, Artificial Sequence
  Cyclic GFR-binding peptide
  MOD_RES (5)..(5): Xaa is C or S
RNVQXRPTQVQLSNITVQIMEIVRKKPIF

SEQ ID NO: 8795 - protein, 16 aa, Artificial Sequence
  Cyclic GFR-binding peptide
  MOD_RES (3)..(3): Xaa is C or S
LEXVPTGQRPVQMRKI

SEQ ID NO: 8796 - protein, 14 aa, Artificial Sequence
  Cyclic GFR-binding peptide
PTQVQLSNITVQIM

SEQ ID NO: 8797 - protein, 21 aa, Artificial Sequence
  Cyclic GFR-binding peptide
PTEERSVKMAKVRIKPHQGQH

SEQ ID NO: 8798 - protein, 22 aa, Artificial Sequence
  Cyclic GFR-binding peptide
  MOD_RES (5)..(5): Xaa is C or S
SSVKXQPSRVHHSNITVQIMEY

SEQ ID NO: 8799 - protein, 27 aa, Artificial Sequence
  Cyclic GFR-binding peptide
  MOD_RES (5)..(5): Xaa is C or S
SSVKXQPSRVHHRPVQVRKIEYVRKKP

SEQ ID NO: 8800 - protein, 21 aa, Artificial Sequence
  Cyclic GFR-binding peptide
  MOD_RES (5)..(5): Xaa is C or S
RNVQXRPTQVQLSNITVQIME

SEQ ID NO: 8801 - protein, 13 aa, Artificial Sequence
  Cyclic GFR-binding peptide
VPTGQRSVKMAKV

SEQ ID NO: 8802 - protein, 21 aa, Artificial Sequence
  Cyclic GFR-binding peptide
  MOD_RES (7)..(7): Xaa is C or S
NDEGLEXVPTGQRPVQMRKIR

SEQ ID NO: 8803 - protein, 18 aa, Artificial Sequence
  Cyclic GFR-binding peptide
  MOD_RES (5)..(5): Xaa is C or S
EGLEXVPTGQRSVKMAKV

SEQ ID NO: 8804 - protein, 18 aa, Artificial Sequence
  Cyclic GFR-binding peptide
QRSVKMAKVRIKPHQGQH

SEQ ID NO: 8805 - protein, 20 aa, Artificial Sequence
  Cyclic GFR-binding peptide
VQLRSVKVAKVEIVRKKPIF

SEQ ID NO: 8806 - protein, 23 aa, Artificial Sequence
  Cyclic GFR-binding peptide
  MOD_RES (5)..(5): Xaa is C or S
SSVKXQPSRVHHRPVQVRKIEYV

SEQ ID NO: 8807 - protein, 23 aa, Artificial Sequence
  Cyclic GFR-binding peptide
  MOD_RES (5)..(5): Xaa is C or S
SSVKXQPSRVHHSNITVQIMEYV

SEQ ID NO: 8808 - protein, 29 aa, Artificial Sequence
  Cyclic GFR-binding peptide
  MOD_RES (7)..(7): Xaa is C or S
NDEGLEXVPTEERPVQMRKIRIKPHQGQH

SEQ ID NO: 8809 - protein, 29 aa, Artificial Sequence
  Cyclic GFR-binding peptide
  MOD_RES (5)..(5): Xaa is C or S
RNVQXRPTQVQLRSVKVAKVEIVRKKPIF

SEQ ID NO: 8810 - protein, 25 aa, Artificial Sequence
  Cyclic GFR-binding peptide
  MOD_RES (5)..(5): Xaa is C or S
RNVQXRPTQVQLRSVKVAKVEIVRK

SEQ ID NO: 8811 - protein, 22 aa, Artificial Sequence
  Cyclic GFR-binding peptide
  MOD_RES (7)..(7): Xaa is C or S
NDEGLEXVPTEERPVQMRKIRI

SEQ ID NO: 8812 - protein, 20 aa, Artificial Sequence
  Cyclic GFR-binding peptide
  MOD_RES (7)..(7): Xaa is C or S
NDEGLEXVPTGQRSVKMAKV

SEQ ID NO: 8813 - protein, 17 aa, Artificial Sequence
  Cyclic GFR-binding peptide
  MOD_RES (4)..(4): Xaa is C or S
GLEXVPTGQRSVKMAKV

SEQ ID NO: 8814 - protein, 18 aa, Artificial Sequence
  Cyclic GFR-binding peptide
ERSVKMAKVRIKPHQGQH

SEQ ID NO: 8815 - protein, 25 aa, Artificial Sequence
  Cyclic GFR-binding peptide
  MOD_RES (5)..(5): Xaa is C or S
RNVQXRPTQVQLSNITVQIMEIVRK

SEQ ID NO: 8816 - protein, 18 aa, Artificial Sequence
  Cyclic GFR-binding peptide
  MOD_RES (3)..(3): Xaa is C or S
VKXQPSRVHHRPVQVRKI

SEQ ID NO: 8817 - protein, 17 aa, Artificial Sequence
  Cyclic GFR-binding peptide
  MOD_RES (2)..(2): Xaa is C or S
KXQPSRVHHRPVQVRKI

SEQ ID NO: 8818 - protein, 26 aa, Artificial Sequence
  Cyclic GFR-binding peptide
  MOD_RES (7)..(7): Xaa is C or S
NDEGLEXVPTGQRPVQMRKIRIKPHQ

SEQ ID NO: 8819 - protein, 17 aa, Artificial Sequence
  Cyclic GFR-binding peptide
  MOD_RES (4)..(4): Xaa is C or S
GLEXVPTEERSVKMAKV

SEQ ID NO: 8820 - protein, 19 aa, Artificial Sequence
  Cyclic GFR-binding peptide
EERSVKMAKVRIKPHQGQH

SEQ ID NO: 8821 - protein, 18 aa, Artificial Sequence
  Cyclic GFR-binding peptide
  MOD_RES (5)..(5): Xaa is C or S
EGLEXVPTEERSVKMAKV

SEQ ID NO: 8822 - protein, 16 aa, Artificial Sequence
  Cyclic GFR-binding peptide
  MOD_RES (1)..(1): Xaa is C or S
XQPSRVHHRPVQVRKI

SEQ ID NO: 8823 - protein, 29 aa, Artificial Sequence
  Cyclic GFR-binding peptide
  MOD_RES (5)..(5): Xaa is C or S
SSVKXQPSRVHHSNITVQIMEYVRKKPKL

SEQ ID NO: 8824 - protein, 29 aa, Artificial Sequence
  Cyclic GFR-binding peptide
  MOD_RES (5)..(5): Xaa is C or S
SSVKXQPSRVHHRPVQVRKIEYVRKKPKL

SEQ ID NO: 8825 - protein, 19 aa, Artificial Sequence
  Cyclic GFR-binding peptide
QLRSVKVAKVEIVRKKPIF

SEQ ID NO: 8826 - protein, 22 aa, Artificial Sequence
  Cyclic GFR-binding peptide
  MOD_RES (7)..(7): Xaa is C or S
NDEGLEXVPTGQRPVQMRKIRI

SEQ ID NO: 8827 - protein, 20 aa, Artificial Sequence
  Cyclic GFR-binding peptide
TGQRPVQMRKIRIKPHQGQH

SEQ ID NO: 8828 - protein, 18 aa, Artificial Sequence
  Cyclic GFR-binding peptide
  MOD_RES (3)..(3): Xaa is C or S
VQXRPTQVQLSNITVQIM

SEQ ID NO: 8829 - protein, 19 aa, Artificial Sequence
  Cyclic GFR-binding peptide
HHSNITVQIMEYVRKKPKL

SEQ ID NO: 8830 - protein, 14 aa, Artificial Sequence
  Cyclic GFR-binding peptide
PSRVHHRPVQVRKI

SEQ ID NO: 8831 - protein, 26 aa, Artificial Sequence
  Cyclic GFR-binding peptide
  MOD_RES (7)..(7): Xaa is C or S
NDEGLEXVPTEERPVQMRKIRIKPHQ

SEQ ID NO: 8832 - protein, 21 aa, Artificial Sequence
  Cyclic GFR-binding peptide
  MOD_RES (5)..(5): Xaa is C or S
SSVKXQPSRVHHRPVQVRKIE

SEQ ID NO: 8833 - protein, 17 aa, Artificial Sequence
  Cyclic GFR-binding peptide
RPVQMRKIRIKPHQGQH

SEQ ID NO: 8834 - protein, 23 aa, Artificial Sequence
  Cyclic GFR-binding peptide
  MOD_RES (7)..(7): Xaa is C or S
NDEGLEXVPTEERSVKMAKVRIK

SEQ ID NO: 8835 - protein, 14 aa, Artificial Sequence
  Cyclic GFR-binding peptide
  MOD_RES (1)..(1): Xaa is C or S
XVPTEERSVKMAKV

SEQ ID NO: 8836 - protein, 27 aa, Artificial Sequence
  Cyclic GFR-binding peptide
  MOD_RES (7)..(7): Xaa is C or S
NDEGLEXVPTGQRPVQMRKIRIKPHQG

SEQ ID NO: 8837 - protein, 29 aa, Artificial Sequence
  Cyclic GFR-binding peptide
  MOD_RES (7)..(7): Xaa is C or S
NDEGLEXVPTGQRSVKMAKVRIKPHQGQH

SEQ ID NO: 8838 - protein, 15 aa, Artificial Sequence
  Cyclic GFR-binding peptide
RPTQVQLSNITVQIM

SEQ ID NO: 8839 - protein, 26 aa, Artificial Sequence
  Cyclic GFR-binding peptide
  MOD_RES (5)..(5): Xaa is C or S
RNVQXRPTQVQLRSVKVAKVEIVRKK

SEQ ID NO: 8840 - protein, 15 aa, Artificial Sequence
  Cyclic GFR-binding peptide
RPTQVQLRSVKVAKV

SEQ ID NO: 8841 - protein, 20 aa, Artificial Sequence
  Cyclic GFR-binding peptide
  MOD_RES (5)..(5): Xaa is C or S
RNVQXRPTQVQLSNITVQIM

SEQ ID NO: 8842 - protein, 25 aa, Artificial Sequence
  Cyclic GFR-binding peptide
  MOD_RES (7)..(7): Xaa is C or S
NDEGLEXVPTGQRPVQMRKIRIKPH

SEQ ID NO: 8843 - protein, 21 aa, Artificial Sequence
  Cyclic GFR-binding peptide
  MOD_RES (7)..(7): Xaa is C or S
NDEGLEXVPTEERPVQMRKIR

SEQ ID NO: 8844 - protein, 15 aa, Artificial Sequence
  Cyclic GFR-binding peptide
QPSRVHHRPVQVRKI

SEQ ID NO: 8845 - protein, 14 aa, Artificial Sequence
  Cyclic GFR-binding peptide
  MOD_RES (1)..(1): Xaa is C or S
XVPTGQRPVQMRKI

SEQ ID NO: 8846 - protein, 19 aa, Artificial Sequence
  Cyclic GFR-binding peptide
  MOD_RES (4)..(4): Xaa is C or S
SVKXQPSRVHHRPVQVRKI

SEQ ID NO: 8847 - protein, 20 aa, Artificial Sequence
  Cyclic GFR-binding peptide
  MOD_RES (5)..(5): Xaa is C or S
RNVQXRPTQVQLRSVKVAKV

SEQ ID NO: 8848 - protein, 17 aa, Artificial Sequence
  Cyclic GFR-binding peptide
  MOD_RES (4)..(4): Xaa is C or S
GLEXVPTEERPVQMRKI

SEQ ID NO: 8849 - protein, 21 aa, Artificial Sequence
  Cyclic GFR-binding peptide
RVHHSNITVQIMEYVRKKPKL

SEQ ID NO: 8850 - protein, 27 aa, Artificial Sequence
  Cyclic GFR-binding peptide
  MOD_RES (7)..(7): Xaa is C or S
NDEGLEXVPTGQRSVKMAKVRIKPHQG

SEQ ID NO: 8851 - protein, 20 aa, Artificial Sequence
  Cyclic GFR-binding peptide
TEERSVKMAKVRIKPHQGQH

SEQ ID NO: 8852 - protein, 20 aa, Artificial Sequence
  Cyclic GFR-binding peptide
  MOD_RES (7)..(7): Xaa is C or S
NDEGLEXVPTEERSVKMAKV

SEQ ID NO: 8853 - protein, 16 aa, Artificial Sequence
  Cyclic GFR-binding peptide
  MOD_RES (3)..(3): Xaa is C or S
LEXVPTEERPVQMRKI

SEQ ID NO: 8854 - protein, 17 aa, Artificial Sequence
  Cyclic GFR-binding peptide
SNITVQIMEYVRKKPKL

SEQ ID NO: 8855 - protein, 18 aa, Artificial Sequence
  Cyclic GFR-binding peptide
  MOD_RES (3)..(3): Xaa is C or S
VQXRPTQVQLRSVKVAKV

SEQ ID NO: 8856 - protein, 17 aa, Artificial Sequence
  Cyclic GFR-binding peptide
  MOD_RES (2)..(2): Xaa is C or S
KXQPSRVHHSNITVQIM

SEQ ID NO: 8857 - protein, 17 aa, Artificial Sequence
  Cyclic GFR-binding peptide
RSVKVAKVEIVRKKPIF

SEQ ID NO: 8858 - protein, 26 aa, Artificial Sequence
  Cyclic GFR-binding peptide
  MOD_RES (7)..(7): Xaa is C or S
NDEGLEXVPTGQRSVKMAKVRIKPHQ

SEQ ID NO: 8859 - protein, 23 aa, Artificial Sequence
  Cyclic GFR-binding peptide
  MOD_RES (7)..(7): Xaa is C or S
NDEGLEXVPTEERPVQMRKIRIK

SEQ ID NO: 8860 - protein, 22 aa, Artificial Sequence
  Cyclic GFR-binding peptide
  MOD_RES (7)..(7): Xaa is C or S
NDEGLEXVPTGQRSVKMAKVRI

SEQ ID NO: 8861 - protein, 21 aa, Artificial Sequence
  Cyclic GFR-binding peptide
PTEERPVQMRKIRIKPHQGQH

SEQ ID NO: 8862 - protein, 25 aa, Artificial Sequence
  Cyclic GFR-binding peptide
  MOD_RES (7)..(7): Xaa is C or S
NDEGLEXVPTEERPVQMRKIRIKPH

SEQ ID NO: 8863 - protein, 18 aa, Artificial Sequence
  Cyclic GFR-binding peptide
QRPVQMRKIRIKPHQGQH

SEQ ID NO: 8864 - protein, 27 aa, Artificial Sequence
  Cyclic GFR-binding peptide
  MOD_RES (5)..(5): Xaa is C or S
RNVQXRPTQVQLSNITVQIMEIVRKKP

SEQ ID NO: 8865 - protein, 23 aa, Artificial Sequence
  Cyclic GFR-binding peptide
  MOD_RES (7)..(7): Xaa is C or S
NDEGLEXVPTGQRSVKMAKVRIK

SEQ ID NO: 8866 - protein, 28 aa, Artificial Sequence
  Cyclic GFR-binding peptide
  MOD_RES (7)..(7): Xaa is C or S
NDEGLEXVPTGQRPVQMRKIRIKPHQGQ

SEQ ID NO: 8867 - protein, 23 aa, Artificial Sequence
  Cyclic GFR-binding peptide
  MOD_RES (7)..(7): Xaa is C or S
NDEGLEXVPTGQRPVQMRKIRIK

SEQ ID NO: 8868 - protein, 19 aa, Artificial Sequence
  Cyclic GFR-binding peptide
  MOD_RES (6)..(6): Xaa is C or S
DEGLEXVPTGQRSVKMAKV

SEQ ID NO: 8869 - protein, 13 aa, Artificial Sequence
  Cyclic GFR-binding peptide
SRVHHSNITVQIM

SEQ ID NO: 8870 - protein, 21 aa, Artificial Sequence
  Cyclic GFR-binding peptide
  MOD_RES (7)..(7): Xaa is C or S
NDEGLEXVPTGQRSVKMAKVR

SEQ ID NO: 8871 - protein, 19 aa, Artificial Sequence
  Cyclic GFR-binding peptide
GQRPVQMRKIRIKPHQGQH

SEQ ID NO: 8872 - protein, 20 aa, Artificial Sequence
  Cyclic GFR-binding peptide
  MOD_RES (5)..(5): Xaa is C or S
SSVKXQPSRVHHSNITVQIM

SEQ ID NO: 8873 - protein, 21 aa, Artificial Sequence
  Cyclic GFR-binding peptide
QVQLRSVKVAKVEIVRKKPIF

SEQ ID NO: 8874 - protein, 20 aa, Artificial Sequence
  Cyclic GFR-binding peptide
VHHSNITVQIMEYVRKKPKL

SEQ ID NO: 8875 - protein, 18 aa, Artificial Sequence
  Cyclic GFR-binding peptide
LSNITVQIMEIVRKKPIF

SEQ ID NO: 8876 - protein, 14 aa, Artificial Sequence
  Cyclic GFR-binding peptide
  MOD_RES (1)..(1): Xaa is C or S
XVPTGQRSVKMAKV

SEQ ID NO: 8877 - protein, 19 aa, Artificial Sequence
  Cyclic GFR-binding peptide
  MOD_RES (6)..(6): Xaa is C or S
DEGLEXVPTEERPVQMRKI

SEQ ID NO: 8878 - protein, 21 aa, Artificial Sequence
  Cyclic GFR-binding peptide
  MOD_RES (5)..(5): Xaa is C or S
SSVKXQPSRVHHSNITVQIME

SEQ ID NO: 8879 - protein, 13 aa, Artificial Sequence
  Cyclic GFR-binding peptide
VPTEERPVQMRKI

SEQ ID NO: 8880 - protein, 18 aa, Artificial Sequence
  Cyclic GFR-binding peptide
  MOD_RES (3)..(3): Xaa is C or S
VKXQPSRVHHSNITVQIM

SEQ ID NO: 8881 - protein, 27 aa, Artificial Sequence
  Cyclic GFR-binding peptide
  MOD_RES (7)..(7): Xaa is C or S
NDEGLEXVPTEERSVKMAKVRIKPHQG

SEQ ID NO: 8882 - protein, 22 aa, Artificial Sequence
  Cyclic GFR-binding peptide
  MOD_RES (7)..(7): Xaa is C or S
NDEGLEXVPTEERSVKMAKVRI

SEQ ID NO: 8883 - protein, 28 aa, Artificial Sequence
  Cyclic GFR-binding peptide
  MOD_RES (5)..(5): Xaa is C or S
RNVQXRPTQVQLSNITVQIMEIVRKKPI

SEQ ID NO: 8884 - protein, 16 aa, Artificial Sequence
  Cyclic GFR-binding peptide
  MOD_RES (1)..(1): Xaa is C or S
XRPTQVQLRSVKVAKV

SEQ ID NO: 8885 - protein, 14 aa, Artificial Sequence
  Cyclic GFR-binding peptide
PTQVQLRSVKVAKV

SEQ ID NO: 8886 - protein, 13 aa, Artificial Sequence
  Cyclic GFR-binding peptide
SRVHHRPVQVRKI

SEQ ID NO: 8887 - protein, 27 aa, Artificial Sequence
  Cyclic GFR-binding peptide
  MOD_RES (7)..(7): Xaa is C or S
NDEGLEXVPTEERPVQMRKIRIKPHQG

SEQ ID NO: 8888 - protein, 21 aa, Artificial Sequence
  Cyclic GFR-binding peptide
  MOD_RES (7)..(7): Xaa is C or S
NDEGLEXVPTEERSVKMAKVR

SEQ ID NO: 8889 - protein, 23 aa, Artificial Sequence
  Cyclic GFR-binding peptide
  MOD_RES (5)..(5): Xaa is C or S
RNVQXRPTQVQLRSVKVAKVEIV

SEQ ID NO: 8890 - protein, 25 aa, Artificial Sequence
  Cyclic GFR-binding peptide
  MOD_RES (5)..(5): Xaa is C or S
SSVKXQPSRVHHRPVQVRKIEYVRK

SEQ ID NO: 8891 - protein, 22 aa, Artificial Sequence
  Cyclic GFR-binding peptide
  MOD_RES (5)..(5): Xaa is C or S
RNVQXRPTQVQLRSVKVAKVEI

SEQ ID NO: 8892 - protein, 26 aa, Artificial Sequence
  Cyclic GFR-binding peptide
  MOD_RES (5)..(5): Xaa is C or S
SSVKXQPSRVHHSNITVQIMEYVRKK

SEQ ID NO: 8893 - protein, 17 aa, Artificial Sequence
  Cyclic GFR-binding peptide
  MOD_RES (2)..(2): Xaa is C or S
QXRPTQVQLSNITVQIM

SEQ ID NO: 8894 - protein, 25 aa, Artificial Sequence
  Cyclic GFR-binding peptide
  MOD_RES (5)..(5): Xaa is C or S
SSVKXQPSRVHHSNITVQIMEYVRK

SEQ ID NO: 8895 - protein, 18 aa, Artificial Sequence
  Cyclic GFR-binding peptide
  MOD_RES (5)..(5): Xaa is C or S
EGLEXVPTEERPVQMRKI

SEQ ID NO: 8896 - protein, 20 aa, Artificial Sequence
  Cyclic GFR-binding peptide
VQLSNITVQIMEIVRKKPIF

SEQ ID NO: 8897 - protein, 18 aa, Artificial Sequence
  Cyclic GFR-binding peptide
  MOD_RES (5)..(5): Xaa is C or S
EGLEXVPTGQRPVQMRKI

SEQ ID NO: 8898 - protein, 20 aa, Artificial Sequence
  Cyclic GFR-binding peptide
  MOD_RES (7)..(7): Xaa is C or S
NDEGLEXVPTGQRPVQMRKI

SEQ ID NO: 8899 - protein, 17 aa, Artificial Sequence
  Cyclic GFR-binding peptide
  MOD_RES (2)..(2): Xaa is C or S
QXRPTQVQLRSVKVAKV

SEQ ID NO: 8900 - protein, 29 aa, Artificial Sequence
  Cyclic GFR-binding peptide
  MOD_RES (7)..(7): Xaa is C or S
NDEGLEXVPTGQRPVQMRKIRIKPHQGQH

SEQ ID NO: 8901 - protein, 25 aa, Artificial Sequence
  Cyclic GFR-binding peptide
  MOD_RES (7)..(7): Xaa is C or S
NDEGLEXVPTEERSVKMAKVRIKPH

SEQ ID NO: 8902 - protein, 15 aa, Artificial Sequence
  Cyclic GFR-binding peptide
  MOD_RES (2)..(2): Xaa is C or S
EXVPTGQRPVQMRKI

SEQ ID NO: 8903 - protein, 26 aa, Artificial Sequence
  Cyclic GFR-binding peptide
  MOD_RES (5)..(5): Xaa is C or S
SSVKXQPSRVHHRPVQVRKIEYVRKK

SEQ ID NO: 8904 - protein, 20 aa, Artificial Sequence
  Cyclic GFR-binding peptide
  MOD_RES (7)..(7): Xaa is C or S
NDEGLEXVPTEERPVQMRKI

SEQ ID NO: 8905 - protein, 19 aa, Artificial Sequence
  Cyclic GFR-binding peptide
HHRPVQVRKIEYVRKKPKL

SEQ ID NO: 8906 - protein, 17 aa, Artificial Sequence
  Cyclic GFR-binding peptide
  MOD_RES (4)..(4): Xaa is C or S
GLEXVPTGQRPVQMRKI

SEQ ID NO: 8907 - protein, 19 aa, Artificial Sequence
  Cyclic GFR-binding peptide
  MOD_RES (4)..(4): Xaa is C or S
SVKXQPSRVHHSNITVQIM

SEQ ID NO: 8908 - protein, 16 aa, Artificial Sequence
  Cyclic GFR-binding peptide
  MOD_RES (3)..(3): Xaa is C or S
LEXVPTEERSVKMAKV

SEQ ID NO: 8909 - protein, 27 aa, Artificial Sequence
  Cyclic GFR-binding peptide
  MOD_RES (5)..(5): Xaa is C or S
RNVQXRPTQVQLRSVKVAKVEIVRKKP

SEQ ID NO: 8910 - protein, 19 aa, Artificial Sequence
  Cyclic GFR-binding peptide
GQRSVKMAKVRIKPHQGQH

SEQ ID NO: 8911 - protein, 19 aa, Artificial Sequence
  Cyclic GFR-binding peptide
  MOD_RES (4)..(4): Xaa is C or S
NVQXRPTQVQLSNITVQIM

SEQ ID NO: 8912 - protein, 16 aa, Artificial Sequence
  Cyclic GFR-binding peptide
  MOD_RES (1)..(1): Xaa is C or S
XQPSRVHHSNITVQIM

SEQ ID NO: 8913 - protein, 26 aa, Artificial Sequence
  Cyclic GFR-binding peptide
  MOD_RES (5)..(5): Xaa is C or S
RNVQXRPTQVQLSNITVQIMEIVRKK

SEQ ID NO: 8914 - protein, 18 aa, Artificial Sequence
  Cyclic GFR-binding peptide
HRPVQVRKIEYVRKKPKL

SEQ ID NO: 8915 - protein, 15 aa, Artificial Sequence
  Cyclic GFR-binding peptide
  MOD_RES (2)..(2): Xaa is C or S
EXVPTEERPVQMRKI

SEQ ID NO: 8916 - protein, 21 aa, Artificial Sequence
  Cyclic GFR-binding peptide
QVQLSNITVQIMEIVRKKPIF

SEQ ID NO: 8917 - protein, 18 aa, Artificial Sequence
  Cyclic GFR-binding peptide
LRSVKVAKVEIVRKKPIF

SEQ ID NO: 8918 - protein, 18 aa, Artificial Sequence
  Cyclic GFR-binding peptide
HSNITVQIMEYVRKKPKL

SEQ ID NO: 8919 - protein, 17 aa, Artificial Sequence
  Cyclic GFR-binding peptide
SNITVQIMEIVRKKPIF

SEQ ID NO: 8920 - protein, 28 aa, Artificial Sequence
  Cyclic GFR-binding peptide
  MOD_RES (7)..(7): Xaa is C or S
NDEGLEXVPTEERSVKMAKVRIKPHQGQ

SEQ ID NO: 8921 - protein, 23 aa, Artificial Sequence
  Cyclic GFR-binding peptide
  MOD_RES (17)..(18): Xaa is C or S
RGVLYLISIPELDQPVXXPSASA

SEQ ID NO: 8922 - protein, 13 aa, Artificial Sequence
  Cyclic GFR-binding peptide
LYLISIPELDQPV

SEQ ID NO: 8923 - protein, 14 aa, Artificial Sequence
  Cyclic GFR-binding peptide
  MOD_RES (14)..(14): Xaa is C or S
FYLISIANLKTPVX

SEQ ID NO: 8924 - protein, 13 aa, Artificial Sequence
  Cyclic GFR-binding peptide
LYLMSIPELETPV

SEQ ID NO: 8925 - protein, 19 aa, Artificial Sequence
  Cyclic GFR-binding peptide
  MOD_RES (14)..(15): Xaa is C or S
KYLISIPSLRAPVXXSAPA

SEQ ID NO: 8926 - protein, 14 aa, Artificial Sequence
  Cyclic GFR-binding peptide
  MOD_RES (14)..(14): Xaa is C or S
LYLISIPELDQSVX

SEQ ID NO: 8927 - protein, 17 aa, Artificial Sequence
  Cyclic GFR-binding peptide
VVNNAADKYLISIPSLR

SEQ ID NO: 8928 - protein, 19 aa, Artificial Sequence
  Cyclic GFR-binding peptide
VVNNAADKYLISIPSLRAP

SEQ ID NO: 8929 - protein, 26 aa, Artificial Sequence
  Cyclic GFR-binding peptide
  MOD_RES (20)..(21): Xaa is C or S
VNSSDDIYLVSIPSLQTPAXXPKPVT

SEQ ID NO: 8930 - protein, 21 aa, Artificial Sequence
  Cyclic GFR-binding peptide
  MOD_RES (15)..(16): Xaa is C or S
DKYLISIPSLKTPVXXAKSAK

SEQ ID NO: 8931 - protein, 16 aa, Artificial Sequence
  Cyclic GFR-binding peptide
  MOD_RES (14)..(14): Xaa is C or S
LYLVSIPELKTPAXTP

SEQ ID NO: 8932 - protein, 19 aa, Artificial Sequence
  Cyclic GFR-binding peptide
IVNSSDDLYLVSIPELKTP

SEQ ID NO: 8933 - protein, 14 aa, Artificial Sequence
  Cyclic GFR-binding peptide
  MOD_RES (14)..(14): Xaa is C or S
IYLISIPSLKTPVX

SEQ ID NO: 8934 - protein, 14 aa, Artificial Sequence
  Cyclic GFR-binding peptide
  MOD_RES (14)..(14): Xaa is C or S
KYLISIPSLKTPVX

SEQ ID NO: 8935 - protein, 18 aa, Artificial Sequence
  Cyclic GFR-binding peptide
VVNNAADLYLISIPELRA

SEQ ID NO: 8936 - protein, 24 aa, Artificial Sequence
  Cyclic GFR-binding peptide
  MOD_RES (18)..(19): Xaa is C or S
ENEDLYLMSIPELETPVXXAKPIK

SEQ ID NO: 8937 - protein, 18 aa, Artificial Sequence
  Cyclic GFR-binding peptide
YTVVGKDFYLISIANLKT

SEQ ID NO: 8938 - protein, 22 aa, Artificial Sequence
  Cyclic GFR-binding peptide
  MOD_RES (16)..(17): Xaa is C or S
SDLYLVSIPELKTPAXXAKPVA

SEQ ID NO: 8939 - protein, 22 aa, Artificial Sequence
  Cyclic GFR-binding peptide
  MOD_RES (16)..(17): Xaa is C or S
DDLYLVSIPELKTPVXXAKGVK

SEQ ID NO: 8940 - protein, 19 aa, Artificial Sequence
  Cyclic GFR-binding peptide
VKPTRGVLYLISIPELDQP

SEQ ID NO: 8941 - protein, 17 aa, Artificial Sequence
  Cyclic GFR-binding peptide
  MOD_RES (14)..(15): Xaa is C or S
LYLISIPELDQSVXXPS

SEQ ID NO: 8942 - protein, 25 aa, Artificial Sequence
  Cyclic GFR-binding peptide
  MOD_RES (19)..(20): Xaa is C or S
KDYEDIYLMSIPSLETPVXXAKPIS

SEQ ID NO: 8943 - protein, 26 aa, Artificial Sequence
  Cyclic GFR-binding peptide
  MOD_RES (20)..(21): Xaa is C or S
KPTRGVLYLISIPELDQPVXXPSASA

SEQ ID NO: 8944 - protein, 16 aa, Artificial Sequence
  Cyclic GFR-binding peptide
  MOD_RES (14)..(15): Xaa is C or S
FYLISIANLRAPVXXS

SEQ ID NO: 8945 - protein, 25 aa, Artificial Sequence
  Cyclic GFR-binding peptide
  MOD_RES (19)..(20): Xaa is C or S
KENEDLYLMSIPELETPVXXAKPIK

SEQ ID NO: 8946 - protein, 22 aa, Artificial Sequence
  Cyclic GFR-binding peptide
  MOD_RES (16)..(17): Xaa is C or S
EDLYLMSIPELETPVXXAKPIS

SEQ ID NO: 8947 - protein, 19 aa, Artificial Sequence
  Cyclic GFR-binding peptide
  MOD_RES (14)..(15): Xaa is C or S
FYLISIANLRAPVXXSAPA

SEQ ID NO: 8948 - protein, 17 aa, Artificial Sequence
  Cyclic GFR-binding peptide
  MOD_RES (14)..(14): Xaa is C or S
LYLVSIPELKTPAXTPK

SEQ ID NO: 8949 - protein, 18 aa, Artificial Sequence
  Cyclic GFR-binding peptide
IVNSSDDIYLVSIPSLQT

SEQ ID NO: 8950 - protein, 18 aa, Artificial Sequence
  Cyclic GFR-binding peptide
IVNSSDDIYLVSIPSLKT

SEQ ID NO: 8951 - protein, 17 aa, Artificial Sequence
  Cyclic GFR-binding peptide
VKPKRGVLYLISIPELA

SEQ ID NO: 8952 - protein, 16 aa, Artificial Sequence
  Cyclic GFR-binding peptide
  MOD_RES (14)..(15): Xaa is C or S
KYLISIPSLRAPVXXS

SEQ ID NO: 8953 - protein, 17 aa, Artificial Sequence
  Cyclic GFR-binding peptide
  MOD_RES (14)..(15): Xaa is C or S
LYLVSIPELKTPAXXAK

SEQ ID NO: 8954 - protein, 23 aa, Artificial Sequence
  Cyclic GFR-binding peptide
  MOD_RES (17)..(18): Xaa is C or S
MDDIYLVSIPSLKTPVXXAKGVK

SEQ ID NO: 8955 - protein, 24 aa, Artificial Sequence
  Cyclic GFR-binding peptide
  MOD_RES (18)..(19): Xaa is C or S
NAADFYLISIANLRAPVXXSAPAA

SEQ ID NO: 8956 - protein, 15 aa, Artificial Sequence
  Cyclic GFR-binding peptide
IVNSSDDLYLVSIPE

SEQ ID NO: 8957 - protein, 15 aa, Artificial Sequence
  Cyclic GFR-binding peptide
  MOD_RES (14)..(15): Xaa is C or S
LYLMSIPELETPVXX

SEQ ID NO: 8958 - protein, 17 aa, Artificial Sequence
  Cyclic GFR-binding peptide
VKPTRGVLYLISIPELD

SEQ ID NO: 8959 - protein, 19 aa, Artificial Sequence
  Cyclic GFR-binding peptide
VVNNAADFYLISIANLRAP

SEQ ID NO: 8960 - protein, 24 aa, Artificial Sequence
  Cyclic GFR-binding peptide
  MOD_RES (18)..(19): Xaa is C or S
GMDDLYLVSIPELKTPVXXAKGVK

SEQ ID NO: 8961 - protein, 25 aa, Artificial Sequence
  Cyclic GFR-binding peptide
  MOD_RES (19)..(20): Xaa is C or S
PKRGVLYLISIPELAQPVXXPAASA

SEQ ID NO: 8962 - protein, 15 aa, Artificial Sequence
  Cyclic GFR-binding peptide
  MOD_RES (14)..(15): Xaa is C or S
LYLISIPELDQPVXX

SEQ ID NO: 8963 - protein, 18 aa, Artificial Sequence
  Cyclic GFR-binding peptide
VKPKRGVIYLISIPSLAQ

SEQ ID NO: 8964 - protein, 14 aa, Artificial Sequence
  Cyclic GFR-binding peptide
  MOD_RES (14)..(14): Xaa is C or S
LYLVSIPELQTPAX

SEQ ID NO: 8965 - protein, 17 aa, Artificial Sequence
  Cyclic GFR-binding peptide
IKPTKGIIYLISIPSLD

SEQ ID NO: 8966 - protein, 26 aa, Artificial Sequence
  Cyclic GFR-binding peptide
  MOD_RES (20)..(21): Xaa is C or S
KPTKGILYLISIPELDQSVXXPSASA

SEQ ID NO: 8967 - protein, 17 aa, Artificial Sequence
  Cyclic GFR-binding peptide
VVNNAADFYLISIANLR

SEQ ID NO: 8968 - protein, 21 aa, Artificial Sequence
  Cyclic GFR-binding peptide
  MOD_RES (15)..(16): Xaa is C or S
DIYLMSIPSLETPVXXAKPIK

SEQ ID NO: 8969 - protein, 22 aa, Artificial Sequence
  Cyclic GFR-binding peptide
  MOD_RES (16)..(17): Xaa is C or S
DDIYLVSIPSLKTPVXXAKGVK

SEQ ID NO: 8970 - protein, 19 aa, Artificial Sequence
  Cyclic GFR-binding peptide
  MOD_RES (14)..(15): Xaa is C or S
LYLISIPELAQPVXXPAAS

SEQ ID NO: 8971 - protein, 27 aa, Artificial Sequence
  Cyclic GFR-binding peptide
  MOD_RES (21)..(22): Xaa is C or S
IKPTKGIIYLISIPSLDQSVXXPSASA

SEQ ID NO: 8972 - protein, 17 aa, Artificial Sequence
  Cyclic GFR-binding peptide
IVNNSSDLYLVSIPELK

SEQ ID NO: 8973 - protein, 27 aa, Artificial Sequence
  Cyclic GFR-binding peptide
  MOD_RES (21)..(21): Xaa is C or S
IVNSSDDIYLVSIPSLKTPAXTPKTVH

SEQ ID NO: 8974 - protein, 24 aa, Artificial Sequence
  Cyclic GFR-binding peptide
  MOD_RES (18)..(18): Xaa is C or S
SSDDIYLVSIPSLKTPAXTPKTVH

SEQ ID NO: 8975 - protein, 23 aa, Artificial Sequence
  Cyclic GFR-binding peptide
  MOD_RES (17)..(18): Xaa is C or S
NEDIYLMSIPSLETPVXXAKPIK

SEQ ID NO: 8976 - protein, 27 aa, Artificial Sequence
  Cyclic GFR-binding peptide
  MOD_RES (21)..(22): Xaa is C or S
VVKENEDLYLMSIPELETPVXXAKPIK

SEQ ID NO: 8977 - protein, 16 aa, Artificial Sequence
  Cyclic GFR-binding peptide
IVNNSSDLYLVSIPEL

SEQ ID NO: 8978 - protein, 19 aa, Artificial Sequence
  Cyclic GFR-binding peptide
YTVVGKDFYLISIANLKTP

SEQ ID NO: 8979 - protein, 16 aa, Artificial Sequence
  Cyclic GFR-binding peptide
  MOD_RES (14)..(15): Xaa is C or S
LYLVSIPELKTPAXXP

SEQ ID NO: 8980 - protein, 21 aa, Artificial Sequence
  Cyclic GFR-binding peptide
  MOD_RES (15)..(15): Xaa is C or S
DIYLVSIPSLKTPAXTPKTVH

SEQ ID NO: 8981 - protein, 17 aa, Artificial Sequence
  Cyclic GFR-binding peptide
  MOD_RES (14)..(15): Xaa is C or S
IYLMSIPSLETPVXXAK

SEQ ID NO: 8982 - protein, 15 aa, Artificial Sequence
  Cyclic GFR-binding peptide
IVNNSSDIYLVSIPS

SEQ ID NO: 8983 - protein, 19 aa, Artificial Sequence
  Cyclic GFR-binding peptide
VVKDYEDIYLMSIPSLETP

SEQ ID NO: 8984 - protein, 27 aa, Artificial Sequence
  Cyclic GFR-binding peptide
  MOD_RES (21)..(22): Xaa is C or S
VVNNAADLYLISIPELRAPVXXSAPAA

SEQ ID NO: 8985 - protein, 19 aa, Artificial Sequence
  Cyclic GFR-binding peptide
VVNNAADLYLISIPELRAP

SEQ ID NO: 8986 - protein, 24 aa, Artificial Sequence
  Cyclic GFR-binding peptide
  MOD_RES (18)..(19): Xaa is C or S
TRGVLYLISIPELDQPVXXPSASA

SEQ ID NO: 8987 - protein, 19 aa, Artificial Sequence
  Cyclic GFR-binding peptide
VKPKRGVLYLISIPELAQP

SEQ ID NO: 8988 - protein, 19 aa, Artificial Sequence
  Cyclic GFR-binding peptide
  MOD_RES (14)..(15): Xaa is C or S
LYLISIPELDQPVXXPSAS

SEQ ID NO: 8989 - protein, 20 aa, Artificial Sequence
  Cyclic GFR-binding peptide
  MOD_RES (14)..(15): Xaa is C or S
LYLVSIPELKTPVXXAKGVK

SEQ ID NO: 8990 - protein, 20 aa, Artificial Sequence
  Cyclic GFR-binding peptide
  MOD_RES (14)..(15): Xaa is C or S
IYLVSIPSLQTPAXXPKPVT

SEQ ID NO: 8991 - protein, 17 aa, Artificial Sequence
  Cyclic GFR-binding peptide
  MOD_RES (14)..(15): Xaa is C or S
LYLISIPELAQPVXXPA

SEQ ID NO: 8992 - protein, 14 aa, Artificial Sequence
  Cyclic GFR-binding peptide
  MOD_RES (14)..(14): Xaa is C or S
IYLVSIPSLKTPVX

SEQ ID NO: 8993 - protein, 24 aa, Artificial Sequence
  Cyclic GFR-binding peptide
  MOD_RES (18)..(19): Xaa is C or S
NAADKYLISIPSLRAPVXXSAPAA

SEQ ID NO: 8994 - protein, 23 aa, Artificial Sequence
  Cyclic GFR-binding peptide
  MOD_RES (17)..(18): Xaa is C or S
GKDKYLISIPSLKTPVXXAKSAK

SEQ ID NO: 8995 - protein, 24 aa, Artificial Sequence
  Cyclic GFR-binding peptide
  MOD_RES (18)..(19): Xaa is C or S
NAADLYLISIPELRAPVXXSAPAA

SEQ ID NO: 8996 - protein, 21 aa, Artificial Sequence
  Cyclic GFR-binding peptide
  MOD_RES (15)..(16): Xaa is C or S
DFYLISIANLKTPVXXAKSAK

SEQ ID NO: 8997 - protein, 27 aa, Artificial Sequence
  Cyclic GFR-binding peptide
  MOD_RES (21)..(21): Xaa is C or S
IVNSSDDLYLVSIPELKTPAXTPKTVH

SEQ ID NO: 8998 - protein, 20 aa, Artificial Sequence
  Cyclic GFR-binding peptide
  MOD_RES (14)..(15): Xaa is C or S
IYLVSIPSLKTPAXXAKPVA

SEQ ID NO: 8999 - protein, 17 aa, Artificial Sequence
  Cyclic GFR-binding peptide
IVNSSDDLYLVSIPELK

SEQ ID NO: 9000 - protein, 17 aa, Artificial Sequence
  Cyclic GFR-binding peptide
IVNSSDDLYLVSIPELQ

SEQ ID NO: 9001 - protein, 20 aa, Artificial Sequence
  Cyclic GFR-binding peptide
  MOD_RES (14)..(15): Xaa is C or S
LYLVSIPELQTPAXXPKPVT

SEQ ID NO: 9002 - protein, 19 aa, Artificial Sequence
  Cyclic GFR-binding peptide
  MOD_RES (14)..(15): Xaa is C or S
LYLVSIPELQTPAXXPKPV

SEQ ID NO: 9003 - protein, 23 aa, Artificial Sequence
  Cyclic GFR-binding peptide
  MOD_RES (17)..(17): Xaa is C or S
SDDIYLVSIPSLKTPAXTPKTVH

SEQ ID NO: 9004 - protein, 19 aa, Artificial Sequence
  Cyclic GFR-binding peptide
  MOD_RES (14)..(15): Xaa is C or S
IYLISIPSLDQSVXXPSAS

SEQ ID NO: 9005 - protein, 16 aa, Artificial Sequence
  Cyclic GFR-binding peptide
IVNNSSDIYLVSIPSL

SEQ ID NO: 9006 - protein, 22 aa, Artificial Sequence
  Cyclic GFR-binding peptide
  MOD_RES (16)..(16): Xaa is C or S
DDIYLVSIPSLKTPAXTPKTVH

SEQ ID NO: 9007 - protein, 15 aa, Artificial Sequence
  Cyclic GFR-binding peptide
IVNNSSDLYLVSIPE

SEQ ID NO: 9008 - protein, 23 aa, Artificial Sequence
  Cyclic GFR-binding peptide
  MOD_RES (17)..(18): Xaa is C or S
SDDLYLVSIPELKTPAXXPKPVY

SEQ ID NO: 9009 - protein, 22 aa, Artificial Sequence
  Cyclic GFR-binding peptide
  MOD_RES (16)..(17): Xaa is C or S
EDLYLMSIPELETPVXXAKPIK

SEQ ID NO: 9010 - protein, 17 aa, Artificial Sequence
  Cyclic GFR-binding peptide
IVNNSSDIYLVSIPSLK

SEQ ID NO: 9011 - protein, 13 aa, Artificial Sequence
  Cyclic GFR-binding peptide
FYLISIANLKTPV

SEQ ID NO: 9012 - protein, 25 aa, Artificial Sequence
  Cyclic GFR-binding peptide
  MOD_RES (19)..(20): Xaa is C or S
NSSDDLYLVSIPELKTPAXXPKPVY

SEQ ID NO: 9013 - protein, 15 aa, Artificial Sequence
  Cyclic GFR-binding peptide
  MOD_RES (14)..(15): Xaa is C or S
FYLISIANLKTPVXX

SEQ ID NO: 9014 - protein, 16 aa, Artificial Sequence
  Cyclic GFR-binding peptide
VVNNAADLYLISIPEL

SEQ ID NO: 9015 - protein, 18 aa, Artificial Sequence
  Cyclic GFR-binding peptide
YTVVGKDKYLISIPSLKT

SEQ ID NO: 9016 - protein, 27 aa, Artificial Sequence
  Cyclic GFR-binding peptide
  MOD_RES (21)..(22): Xaa is C or S
VKPKRGVLYLISIPELAQPVXXPAASA

SEQ ID NO: 9017 - protein, 15 aa, Artificial Sequence
  Cyclic GFR-binding peptide
YTVVGKDFYLISIAN

SEQ ID NO: 9018 - protein, 25 aa, Artificial Sequence
  Cyclic GFR-binding peptide
  MOD_RES (19)..(20): Xaa is C or S
PTRGVLYLISIPELDQPVXXPSASA

SEQ ID NO: 9019 - protein, 22 aa, Artificial Sequence
  Cyclic GFR-binding peptide
  MOD_RES (16)..(17): Xaa is C or S
EDIYLMSIPSLETPVXXAKPIS

SEQ ID NO: 9020 - protein, 22 aa, Artificial Sequence
  Cyclic GFR-binding peptide
  MOD_RES (16)..(17): Xaa is C or S
GVLYLISIPELAQPVXXPAASA

SEQ ID NO: 9021 - protein, 20 aa, Artificial Sequence
  Cyclic GFR-binding peptide
  MOD_RES (14)..(15): Xaa is C or S
IYLISIPSLDQPVXXPSASA

SEQ ID NO: 9022 - protein, 25 aa, Artificial Sequence
  Cyclic GFR-binding peptide
  MOD_RES (19)..(20): Xaa is C or S
VGMDDIYLVSIPSLKTPVXXAKGVK

SEQ ID NO: 9023 - protein, 17 aa, Artificial Sequence
  Cyclic GFR-binding peptide
  MOD_RES (14)..(15): Xaa is C or S
LYLVSIPELKTPVXXAK

SEQ ID NO: 9024 - protein, 25 aa, Artificial Sequence
  Cyclic GFR-binding peptide
  MOD_RES (19)..(20): Xaa is C or S
PTRGVIYLISIPSLDQPVXXPSASA

SEQ ID NO: 9025 - protein, 26 aa, Artificial Sequence
  Cyclic GFR-binding peptide
  MOD_RES (20)..(21): Xaa is C or S
TVVGKDKYLISIPSLKTPVXXAKSAK

SEQ ID NO: 9026 - protein, 14 aa, Artificial Sequence
  Cyclic GFR-binding peptide
  MOD_RES (14)..(14): Xaa is C or S
LYLISIPELAQPVX

SEQ ID NO: 9027 - protein, 27 aa, Artificial Sequence
  Cyclic GFR-binding peptide
  MOD_RES (21)..(22): Xaa is C or S
VVNNAADKYLISIPSLRAPVXXSAPAA

SEQ ID NO: 9028 - protein, 18 aa, Artificial Sequence
  Cyclic GFR-binding peptide
  MOD_RES (14)..(14): Xaa is C or S
LYLVSIPELKTPAXTPKT

SEQ ID NO: 9029 - protein, 17 aa, Artificial Sequence
  Cyclic GFR-binding peptide
IKPTKGILYLISIPELD

SEQ ID NO: 9030 - protein, 19 aa, Artificial Sequence
  Cyclic GFR-binding peptide
IVNSSDDLYLVSIPELQTP

SEQ ID NO: 9031 - protein, 17 aa, Artificial Sequence
  Cyclic GFR-binding peptide
  MOD_RES (14)..(15): Xaa is C or S
LYLVSIPELQTPAXXPK

SEQ ID NO: 9032 - protein, 24 aa, Artificial Sequence
  Cyclic GFR-binding peptide
  MOD_RES (18)..(19): Xaa is C or S
NSSDIYLVSIPSLKTPAXXAKPVA

SEQ ID NO: 9033 - protein, 26 aa, Artificial Sequence
  Cyclic GFR-binding peptide
  MOD_RES (20)..(21): Xaa is C or S
VNSSDDIYLVSIPSLKTPAXXPKPVY

SEQ ID NO: 9034 - protein, 16 aa, Artificial Sequence
  Cyclic GFR-binding peptide
IVNSSDDLYLVSIPEL

SEQ ID NO: 9035 - protein, 27 aa, Artificial Sequence
  Cyclic GFR-binding peptide
  MOD_RES (21)..(22): Xaa is C or S
VVKDYEDLYLMSIPELETPVXXAKPIS

SEQ ID NO: 9036 - protein, 18 aa, Artificial Sequence
  Cyclic GFR-binding peptide
VKPTRGVIYLISIPSLDQ

SEQ ID NO: 9037 - protein, 19 aa, Artificial Sequence
  Cyclic GFR-binding peptide
IVNNSSDIYLVSIPSLKTP

SEQ ID NO: 9038 - protein, 23 aa, Artificial Sequence
  Cyclic GFR-binding peptide
  MOD_RES (17)..(18): Xaa is C or S
AADLYLISIPELRAPVXXSAPAA

SEQ ID NO: 9039 - protein, 16 aa, Artificial Sequence
  Cyclic GFR-binding peptide
  MOD_RES (14)..(15): Xaa is C or S
LYLMSIPELETPVXXA

SEQ ID NO: 9040 - protein, 24 aa, Artificial Sequence
  Cyclic GFR-binding peptide
  MOD_RES (18)..(19): Xaa is C or S
NSSDLYLVSIPELKTPAXXAKPVA

SEQ ID NO: 9041 - protein, 23 aa, Artificial Sequence
  Cyclic GFR-binding peptide
  MOD_RES (17)..(18): Xaa is C or S
KGILYLISIPELDQSVXXPSASA

SEQ ID NO: 9042 - protein, 15 aa, Artificial Sequence
  Cyclic GFR-binding peptide
VVKDYEDIYLMSIPS

SEQ ID NO: 9043 - protein, 22 aa, Artificial Sequence
  Cyclic GFR-binding peptide
  MOD_RES (16)..(17): Xaa is C or S
GVIYLISIPSLAQPVXXPAASA

SEQ ID NO: 9044 - protein, 21 aa, Artificial Sequence
  Cyclic GFR-binding peptide
  MOD_RES (15)..(16): Xaa is C or S
DIYLISIPSLKTPVXXAKSAK

SEQ ID NO: 9045 - protein, 13 aa, Artificial Sequence
  Cyclic GFR-binding peptide
LYLVSIPELQTPA

SEQ ID NO: 9046 - protein, 14 aa, Artificial Sequence
  Cyclic GFR-binding peptide
  MOD_RES (14)..(14): Xaa is C or S
LYLISIPELDQPVX

SEQ ID NO: 9047 - protein, 19 aa, Artificial Sequence
  Cyclic GFR-binding peptide
  MOD_RES (14)..(15): Xaa is C or S
LYLVSIPELKTPAXXAKPV

SEQ ID NO: 9048 - protein, 15 aa, Artificial Sequence
  Cyclic GFR-binding peptide
  MOD_RES (14)..(15): Xaa is C or S
LYLVSIPELQTPAXX

SEQ ID NO: 9049 - protein, 21 aa, Artificial Sequence
  Cyclic GFR-binding peptide
  MOD_RES (15)..(16): Xaa is C or S
VIYLISIPSLAQPVXXPAASA

SEQ ID NO: 9050 - protein, 26 aa, Artificial Sequence
  Cyclic GFR-binding peptide
  MOD_RES (20)..(21): Xaa is C or S
VNNSSDLYLVSIPELKTPAXXAKPVA

SEQ ID NO: 9051 - protein, 20 aa, Artificial Sequence
  Cyclic GFR-binding peptide
  MOD_RES (14)..(15): Xaa is C or S
KYLISIPSLKTPVXXAKSAK

SEQ ID NO: 9052 - protein, 20 aa, Artificial Sequence
  Cyclic GFR-binding peptide
  MOD_RES (14)..(15): Xaa is C or S
IYLISIPSLKTPVXXAKSAK

SEQ ID NO: 9053 - protein, 13 aa, Artificial Sequence
  Cyclic GFR-binding peptide
LYLISIPELRAPV

SEQ ID NO: 9054 - protein, 15 aa, Artificial Sequence
  Cyclic GFR-binding peptide
  MOD_RES (14)..(15): Xaa is C or S
IYLVSIPSLKTPAXX

SEQ ID NO: 9055 - protein, 19 aa, Artificial Sequence
  Cyclic GFR-binding peptide
  MOD_RES (14)..(15): Xaa is C or S
LYLISIPELRAPVXXSAPA

SEQ ID NO: 9056 - protein, 16 aa, Artificial Sequence
  Cyclic GFR-binding peptide
  MOD_RES (14)..(15): Xaa is C or S
IYLVSIPSLKTPAXXP

SEQ ID NO: 9057 - protein, 22 aa, Artificial Sequence
  Cyclic GFR-binding peptide
  MOD_RES (16)..(17): Xaa is C or S
DDLYLVSIPELKTPAXXPKPVY

SEQ ID NO: 9058 - protein, 19 aa, Artificial Sequence
  Cyclic GFR-binding peptide
  MOD_RES (14)..(15): Xaa is C or S
IYLISIPSLAQPVXXPAAS

SEQ ID NO: 9059 - protein, 18 aa, Artificial Sequence
  Cyclic GFR-binding peptide
  MOD_RES (14)..(15): Xaa is C or S
LYLMSIPELETPVXXAKP

SEQ ID NO: 9060 - protein, 17 aa, Artificial Sequence
  Cyclic GFR-binding peptide
VKPTRGVIYLISIPSLD

SEQ ID NO: 9061 - protein, 21 aa, Artificial Sequence
  Cyclic GFR-binding peptide
  MOD_RES (15)..(16): Xaa is C or S
DKYLISIPSLRAPVXXSAPAA

SEQ ID NO: 9062 - protein, 13 aa, Artificial Sequence
  Cyclic GFR-binding peptide
IYLISIPSLDQPV

SEQ ID NO: 9063 - protein, 14 aa, Artificial Sequence
  Cyclic GFR-binding peptide
  MOD_RES (14)..(14): Xaa is C or S
IYLVSIPSLQTPAX

SEQ ID NO: 9064 - protein, 15 aa, Artificial Sequence
  Cyclic GFR-binding peptide
  MOD_RES (14)..(15): Xaa is C or S
IYLVSIPSLKTPVXX

SEQ ID NO: 9065 - protein, 15 aa, Artificial Sequence
  Cyclic GFR-binding peptide
TPVGMDDIYLVSIPS

SEQ ID NO: 9066 - protein, 22 aa, Artificial Sequence
  Cyclic GFR-binding peptide
  MOD_RES (16)..(17): Xaa is C or S
DDLYLVSIPELQTPAXXPKPVT

SEQ ID NO: 9067 - protein, 18 aa, Artificial Sequence
  Cyclic GFR-binding peptide
VKPKRGVLYLISIPELAQ

SEQ ID NO: 9068 - protein, 16 aa, Artificial Sequence
  Cyclic GFR-binding peptide
IKPTKGILYLISIPEL

SEQ ID NO: 9069 - protein, 18 aa, Artificial Sequence
  Cyclic GFR-binding peptide
  MOD_RES (14)..(15): Xaa is C or S
LYLVSIPELKTPAXXPKP

SEQ ID NO: 9070 - protein, 20 aa, Artificial Sequence
  Cyclic GFR-binding peptide
  MOD_RES (14)..(15): Xaa is C or S
IYLMSIPSLETPVXXAKPIS

SEQ ID NO: 9071 - protein, 23 aa, Artificial Sequence
  Cyclic GFR-binding peptide
  MOD_RES (17)..(18): Xaa is C or S
YEDLYLMSIPELETPVXXAKPIS

SEQ ID NO: 9072 - protein, 24 aa, Artificial Sequence
  Cyclic GFR-binding peptide
  MOD_RES (18)..(19): Xaa is C or S
KRGVLYLISIPELAQPVXXPAASA

SEQ ID NO: 9073 - protein, 18 aa, Artificial Sequence
  Cyclic GFR-binding peptide
  MOD_RES (14)..(15): Xaa is C or S
LYLVSIPELKTPVXXAKG

SEQ ID NO: 9074 - protein, 19 aa, Artificial Sequence
  Cyclic GFR-binding peptide
  MOD_RES (14)..(15): Xaa is C or S
IYLISIPSLDQPVXXPSAS

SEQ ID NO: 9075 - protein, 20 aa, Artificial Sequence
  Cyclic GFR-binding peptide
  MOD_RES (14)..(15): Xaa is C or S
FYLISIANLKTPVXXAKSAK

SEQ ID NO: 9076 - protein, 22 aa, Artificial Sequence
  Cyclic GFR-binding peptide
  MOD_RES (16)..(17): Xaa is C or S
DDIYLVSIPSLKTPAXXPKPVY

SEQ ID NO: 9077 - protein, 20 aa, Artificial Sequence
  Cyclic GFR-binding peptide
  MOD_RES (14)..(15): Xaa is C or S
IYLVSIPSLKTPAXXPKPVY

SEQ ID NO: 9078 - protein, 16 aa, Artificial Sequence
  Cyclic GFR-binding peptide
  MOD_RES (14)..(15): Xaa is C or S
FYLISIANLKTPVXXA

SEQ ID NO: 9079 - protein, 16 aa, Artificial Sequence
  Cyclic GFR-binding peptide
VVKENEDIYLMSIPSL

SEQ ID NO: 9080 - protein, 15 aa, Artificial Sequence
  Cyclic GFR-binding peptide
VVKDYEDLYLMSIPE

SEQ ID NO: 9081 - protein, 25 aa, Artificial Sequence
  Cyclic GFR-binding peptide
  MOD_RES (19)..(20): Xaa is C or S
PTKGIIYLISIPSLDQSVXXPSASA

SEQ ID NO: 9082 - protein, 17 aa, Artificial Sequence
  Cyclic GFR-binding peptide
  MOD_RES (14)..(15): Xaa is C or S
FYLISIANLRAPVXXSA

SEQ ID NO: 9083 - protein, 23 aa, Artificial Sequence
  Cyclic GFR-binding peptide
  MOD_RES (17)..(18): Xaa is C or S
SSDIYLVSIPSLKTPAXXAKPVA

SEQ ID NO: 9084 - protein, 24 aa, Artificial Sequence
  Cyclic GFR-binding peptide
  MOD_RES (18)..(19): Xaa is C or S
TRGVIYLISIPSLDQPVXXPSASA

SEQ ID NO: 9085 - protein, 19 aa, Artificial Sequence
  Cyclic GFR-binding peptide
  MOD_RES (14)..(15): Xaa is C or S
IYLVSIPSLQTPAXXPKPV

SEQ ID NO: 9086 - protein, 19 aa, Artificial Sequence
  Cyclic GFR-binding peptide
  MOD_RES (14)..(15): Xaa is C or S
FYLISIANLKTPVXXAKSA

SEQ ID NO: 9087 - protein, 22 aa, Artificial Sequence
  Cyclic GFR-binding peptide
  MOD_RES (16)..(17): Xaa is C or S
DDIYLVSIPSLQTPAXXPKPVT

SEQ ID NO: 9088 - protein, 25 aa, Artificial Sequence
  Cyclic GFR-binding peptide
  MOD_RES (19)..(20): Xaa is C or S
NNSSDLYLVSIPELKTPAXXAKPVA

SEQ ID NO: 9089 - protein, 24 aa, Artificial Sequence
  Cyclic GFR-binding peptide
  MOD_RES (18)..(19): Xaa is C or S
GMDDIYLVSIPSLKTPVXXAKGVK

SEQ ID NO: 9090 - protein, 19 aa, Artificial Sequence
  Cyclic GFR-binding peptide
  MOD_RES (14)..(15): Xaa is C or S
IYLVSIPSLKTPAXXPKPV

SEQ ID NO: 9091 - protein, 17 aa, Artificial Sequence
  Cyclic GFR-binding peptide
  MOD_RES (14)..(15): Xaa is C or S
IYLVSIPSLKTPVXXAK

SEQ ID NO: 9092 - protein, 16 aa, Artificial Sequence
  Cyclic GFR-binding peptide
  MOD_RES (14)..(14): Xaa is C or S
IYLVSIPSLKTPAXTP

SEQ ID NO: 9093 - protein, 19 aa, Artificial Sequence
  Cyclic GFR-binding peptide
IVNSSDDIYLVSIPSLKTP

SEQ ID NO: 9094 - protein, 25 aa, Artificial Sequence
  Cyclic GFR-binding peptide
  MOD_RES (19)..(20): Xaa is C or S
NNAADLYLISIPELRAPVXXSAPAA

SEQ ID NO: 9095 - protein, 27 aa, Artificial Sequence
  Cyclic GFR-binding peptide
  MOD_RES (21)..(22): Xaa is C or S
TPVGMDDLYLVSIPELKTPVXXAKGVK

SEQ ID NO: 9096 - protein, 27 aa, Artificial Sequence
  Cyclic GFR-binding peptide
  MOD_RES (21)..(22): Xaa is C or S
VVNNAADFYLISIANLRAPVXXSAPAA

SEQ ID NO: 9097 - protein, 19 aa, Artificial Sequence
  Cyclic GFR-binding peptide
IVNSSDDIYLVSIPSLQTP

SEQ ID NO: 9098 - protein, 25 aa, Artificial Sequence
  Cyclic GFR-binding peptide
  MOD_RES (19)..(19): Xaa is C or S
NSSDDIYLVSIPSLKTPAXTPKTVH

SEQ ID NO: 9099 - protein, 15 aa, Artificial Sequence
  Cyclic GFR-binding peptide
  MOD_RES (14)..(15): Xaa is C or S
LYLISIPELAQPVXX

SEQ ID NO: 9100 - protein, 13 aa, Artificial Sequence
  Cyclic GFR-binding peptide
IYLISIPSLDQSV

SEQ ID NO: 9101 - protein, 24 aa, Artificial Sequence
  Cyclic GFR-binding peptide
  MOD_RES (18)..(18): Xaa is C or S
SSDDLYLVSIPELKTPAXTPKTVH

SEQ ID NO: 9102 - protein, 20 aa, Artificial Sequence
  Cyclic GFR-binding peptide
  MOD_RES (14)..(15): Xaa is C or S
IYLISIPSLDQSVXXPSASA

SEQ ID NO: 9103 - protein, 17 aa, Artificial Sequence
  Cyclic GFR-binding peptide
TPVGMDDIYLVSIPSLK

SEQ ID NO: 9104 - protein, 21 aa, Artificial Sequence
  Cyclic GFR-binding peptide
  MOD_RES (15)..(16): Xaa is C or S
DIYLVSIPSLQTPAXXPKPVT

SEQ ID NO: 9105 - protein, 16 aa, Artificial Sequence
  Cyclic GFR-binding peptide
VVKDYEDIYLMSIPSL

SEQ ID NO: 9106 - protein, 21 aa, Artificial Sequence
  Cyclic GFR-binding peptide
  MOD_RES (15)..(16): Xaa is C or S
DIYLMSIPSLETPVXXAKPIS

SEQ ID NO: 9107 - protein, 16 aa, Artificial Sequence
  Cyclic GFR-binding peptide
  MOD_RES (14)..(15): Xaa is C or S
IYLVSIPSLQTPAXXP

SEQ ID NO: 9108 - protein, 18 aa, Artificial Sequence
  Cyclic GFR-binding peptide
IKPTKGIIYLISIPSLDQ

SEQ ID NO: 9109 - protein, 18 aa, Artificial Sequence
  Cyclic GFR-binding peptide
  MOD_RES (14)..(15): Xaa is C or S
LYLISIPELAQPVXXPAA

SEQ ID NO: 9110 - protein, 15 aa, Artificial Sequence
  Cyclic GFR-binding peptide
  MOD_RES (14)..(15): Xaa is C or S
IYLISIPSLKTPVXX

SEQ ID NO: 9111 - protein, 15 aa, Artificial Sequence
  Cyclic GFR-binding peptide
  MOD_RES (14)..(15): Xaa is C or S
KYLISIPSLKTPVXX

SEQ ID NO: 9112 - protein, 21 aa, Artificial Sequence
  Cyclic GFR-binding peptide
  MOD_RES (15)..(16): Xaa is C or S
DFYLISIANLRAPVXXSAPAA

SEQ ID NO: 9113 - protein, 24 aa, Artificial Sequence
  Cyclic GFR-binding peptide
  MOD_RES (18)..(19): Xaa is C or S
DYEDIYLMSIPSLETPVXXAKPIS

SEQ ID NO: 9114 - protein, 17 aa, Artificial Sequence
  Cyclic GFR-binding peptide
  MOD_RES (14)..(15): Xaa is C or S
LYLISIPELDQPVXXPS

SEQ ID NO: 9115 - protein, 22 aa, Artificial Sequence
  Cyclic GFR-binding peptide
  MOD_RES (16)..(16): Xaa is C or S
DDLYLVSIPELKTPAXTPKTVH

SEQ ID NO: 9116 - protein, 16 aa, Artificial Sequence
  Cyclic GFR-binding peptide
VKPKRGVLYLISIPEL

SEQ ID NO: 9117 - protein, 25 aa, Artificial Sequence
  Cyclic GFR-binding peptide
  MOD_RES (19)..(20): Xaa is C or S
NNSSDIYLVSIPSLKTPAXXAKPVA

SEQ ID NO: 9118 - protein, 19 aa, Artificial Sequence
  Cyclic GFR-binding peptide
VKPTRGVIYLISIPSLDQP

SEQ ID NO: 9119 - protein, 27 aa, Artificial Sequence
  Cyclic GFR-binding peptide
  MOD_RES (21)..(22): Xaa is C or S
IVNSSDDLYLVSIPELQTPAXXPKPVT

SEQ ID NO: 9120 - protein, 25 aa, Artificial Sequence
  Cyclic GFR-binding peptide
  MOD_RES (19)..(20): Xaa is C or S
VVGKDKYLISIPSLKTPVXXAKSAK

SEQ ID NO: 9121 - protein, 23 aa, Artificial Sequence
  Cyclic GFR-binding peptide
  MOD_RES (17)..(18): Xaa is C or S
RGVIYLISIPSLAQPVXXPAASA

SEQ ID NO: 9122 - protein, 14 aa, Artificial Sequence
  Cyclic GFR-binding peptide
  MOD_RES (14)..(14): Xaa is C or S
LYLMSIPELETPVX

SEQ ID NO: 9123 - protein, 18 aa, Artificial Sequence
  Cyclic GFR-binding peptide
VVNNAADKYLISIPSLRA

SEQ ID NO: 9124 - protein, 17 aa, Artificial Sequence
  Cyclic GFR-binding peptide
VVKDYEDLYLMSIPELE

SEQ ID NO: 9125 - protein, 16 aa, Artificial Sequence
  Cyclic GFR-binding peptide
  MOD_RES (14)..(15): Xaa is C or S
LYLISIPELDQSVXXP

SEQ ID NO: 9126 - protein, 14 aa, Artificial Sequence
  Cyclic GFR-binding peptide
  MOD_RES (14)..(14): Xaa is C or S
IYLVSIPSLKTPAX

SEQ ID NO: 9127 - protein, 16 aa, Artificial Sequence
  Cyclic GFR-binding peptide
  MOD_RES (14)..(15): Xaa is C or S
LYLISIPELAQPVXXP

SEQ ID NO: 9128 - protein, 20 aa, Artificial Sequence
  Cyclic GFR-binding peptide
  MOD_RES (14)..(15): Xaa is C or S
LYLISIPELDQPVXXPSASA

SEQ ID NO: 9129 - protein, 22 aa, Artificial Sequence
  Cyclic GFR-binding peptide
  MOD_RES (16)..(17): Xaa is C or S
KDKYLISIPSLKTPVXXAKSAK

SEQ ID NO: 9130 - protein, 14 aa, Artificial Sequence
  Cyclic GFR-binding peptide
  MOD_RES (14)..(14): Xaa is C or S
LYLVSIPELKTPVX

SEQ ID NO: 9131 - protein, 19 aa, Artificial Sequence
  Cyclic GFR-binding peptide
VVKENEDIYLMSIPSLETP

SEQ ID NO: 9132 - protein, 16 aa, Artificial Sequence
  Cyclic GFR-binding peptide
  MOD_RES (14)..(15): Xaa is C or S
LYLVSIPELKTPAXXA

SEQ ID NO: 9133 - protein, 17 aa, Artificial Sequence
  Cyclic GFR-binding peptide
  MOD_RES (14)..(15): Xaa is C or S
IYLVSIPSLKTPAXXAK

SEQ ID NO: 9134 - protein, 24 aa, Artificial Sequence
  Cyclic GFR-binding peptide
  MOD_RES (18)..(19): Xaa is C or S
ENEDIYLMSIPSLETPVXXAKPIK

SEQ ID NO: 9135 - protein, 13 aa, Artificial Sequence
  Cyclic GFR-binding peptide
IYLISIPSLAQPV

SEQ ID NO: 9136 - protein, 15 aa, Artificial Sequence
  Cyclic GFR-binding peptide
  MOD_RES (14)..(15): Xaa is C or S
IYLVSIPSLQTPAXX

SEQ ID NO: 9137 - protein, 17 aa, Artificial Sequence
  Cyclic GFR-binding peptide
VVNNAADLYLISIPELR

SEQ ID NO: 9138 - protein, 16 aa, Artificial Sequence
  Cyclic GFR-binding peptide
YTVVGKDFYLISIANL

SEQ ID NO: 9139 - protein, 27 aa, Artificial Sequence
  Cyclic GFR-binding peptide
  MOD_RES (21)..(22): Xaa is C or S
IVNSSDDIYLVSIPSLKTPAXXPKPVY

SEQ ID NO: 9140 - protein, 21 aa, Artificial Sequence
  Cyclic GFR-binding peptide
  MOD_RES (15)..(16): Xaa is C or S
VLYLISIPELAQPVXXPAASA

SEQ ID NO: 9141 - protein, 15 aa, Artificial Sequence
  Cyclic GFR-binding peptide
  MOD_RES (14)..(15): Xaa is C or S
LYLISIPELDQSVXX

SEQ ID NO: 9142 - protein, 18 aa, Artificial Sequence
  Cyclic GFR-binding peptide
  MOD_RES (14)..(15): Xaa is C or S
LYLISIPELRAPVXXSAP

SEQ ID NO: 9143 - protein, 19 aa, Artificial Sequence
  Cyclic GFR-binding peptide
  MOD_RES (14)..(14): Xaa is C or S
IYLVSIPSLKTPAXTPKTV

SEQ ID NO: 9144 - protein, 22 aa, Artificial Sequence
  Cyclic GFR-binding peptide
  MOD_RES (16)..(17): Xaa is C or S
KDFYLISIANLKTPVXXAKSAK

SEQ ID NO: 9145 - protein, 18 aa, Artificial Sequence
  Cyclic GFR-binding peptide
  MOD_RES (14)..(15): Xaa is C or S
IYLVSIPSLKTPAXXAKP

SEQ ID NO: 9146 - protein, 22 aa, Artificial Sequence
  Cyclic GFR-binding peptide
  MOD_RES (16)..(17): Xaa is C or S
GILYLISIPELDQSVXXPSASA

SEQ ID NO: 9147 - protein, 18 aa, Artificial Sequence
  Cyclic GFR-binding peptide
VVNNAADFYLISIANLRA

SEQ ID NO: 9148 - protein, 20 aa, Artificial Sequence
  Cyclic GFR-binding peptide
  MOD_RES (14)..(15): Xaa is C or S
IYLMSIPSLETPVXXAKPIK

SEQ ID NO: 9149 - protein, 18 aa, Artificial Sequence
  Cyclic GFR-binding peptide
  MOD_RES (14)..(15): Xaa is C or S
FYLISIANLKTPVXXAKS

SEQ ID NO: 9150 - protein, 27 aa, Artificial Sequence
  Cyclic GFR-binding peptide
  MOD_RES (21)..(22): Xaa is C or S
IVNNSSDIYLVSIPSLKTPAXXAKPVA

SEQ ID NO: 9151 - protein, 18 aa, Artificial Sequence
  Cyclic GFR-binding peptide
TPVGMDDLYLVSIPELKT

SEQ ID NO: 9152 - protein, 15 aa, Artificial Sequence
  Cyclic GFR-binding peptide
VVNNAADLYLISIPE

SEQ ID NO: 9153 - protein, 23 aa, Artificial Sequence
  Cyclic GFR-binding peptide
  MOD_RES (17)..(18): Xaa is C or S
GKDFYLISIANLKTPVXXAKSAK

SEQ ID NO: 9154 - protein, 21 aa, Artificial Sequence
  Cyclic GFR-binding peptide
  MOD_RES (15)..(16): Xaa is C or S
DLYLMSIPELETPVXXAKPIK

SEQ ID NO: 9155 - protein, 19 aa, Artificial Sequence
  Cyclic GFR-binding peptide
YTVVGKDKYLISIPSLKTP

SEQ ID NO: 9156 - protein, 19 aa, Artificial Sequence
  Cyclic GFR-binding peptide
  MOD_RES (14)..(15): Xaa is C or S
IYLVSIPSLKTPVXXAKGV

SEQ ID NO: 9157 - protein, 27 aa, Artificial Sequence
  Cyclic GFR-binding peptide
  MOD_RES (21)..(22): Xaa is C or S
VVKENEDIYLMSIPSLETPVXXAKPIK

SEQ ID NO: 9158 - protein, 25 aa, Artificial Sequence
  Cyclic GFR-binding peptide
  MOD_RES (19)..(19): Xaa is C or S
NSSDDLYLVSIPELKTPAXTPKTVH

SEQ ID NO: 9159 - protein, 19 aa, Artificial Sequence
  Cyclic GFR-binding peptide
  MOD_RES (14)..(15): Xaa is C or S
LYLMSIPELETPVXXAKPI

SEQ ID NO: 9160 - protein, 20 aa, Artificial Sequence
  Cyclic GFR-binding peptide
  MOD_RES (14)..(14): Xaa is C or S
IYLVSIPSLKTPAXTPKTVH

SEQ ID NO: 9161 - protein, 23 aa, Artificial Sequence
  Cyclic GFR-binding peptide
  MOD_RES (17)..(18): Xaa is C or S
KGIIYLISIPSLDQSVXXPSASA

SEQ ID NO: 9162 - protein, 22 aa, Artificial Sequence
  Cyclic GFR-binding peptide
  MOD_RES (16)..(17): Xaa is C or S
KDIYLISIPSLKTPVXXAKSAK

SEQ ID NO: 9163 - protein, 17 aa, Artificial Sequence
  Cyclic GFR-binding peptide
  MOD_RES (14)..(15): Xaa is C or S
KYLISIPSLKTPVXXAK

SEQ ID NO: 9164 - protein, 17 aa, Artificial Sequence
  Cyclic GFR-binding peptide
  MOD_RES (14)..(15): Xaa is C or S
IYLISIPSLKTPVXXAK

SEQ ID NO: 9165 - protein, 16 aa, Artificial Sequence
  Cyclic GFR-binding peptide
YTVVGKDKYLISIPSL

SEQ ID NO: 9166 - protein, 22 aa, Artificial Sequence
  Cyclic GFR-binding peptide
  MOD_RES (16)..(17): Xaa is C or S
GIIYLISIPSLDQSVXXPSASA

SEQ ID NO: 9167 - protein, 22 aa, Artificial Sequence
  Cyclic GFR-binding peptide
  MOD_RES (16)..(17): Xaa is C or S
SDIYLVSIPSLKTPAXXAKPVA

SEQ ID NO: 9168 - protein, 21 aa, Artificial Sequence
  Cyclic GFR-binding peptide
  MOD_RES (15)..(16): Xaa is C or S
IIYLISIPSLDQSVXXPSASA

SEQ ID NO: 9169 - protein, 18 aa, Artificial Sequence
  Cyclic GFR-binding peptide
  MOD_RES (14)..(15): Xaa is C or S
IYLISIPSLDQSVXXPSA

SEQ ID NO: 9170 - protein, 26 aa, Artificial Sequence
  Cyclic GFR-binding peptide
  MOD_RES (20)..(21): Xaa is C or S
VNNAADFYLISIANLRAPVXXSAPAA

SEQ ID NO: 9171 - protein, 15 aa, Artificial Sequence
  Cyclic GFR-binding peptide
  MOD_RES (14)..(15): Xaa is C or S
LYLVSIPELKTPAXX

SEQ ID NO: 9172 - protein, 21 aa, Artificial Sequence
  Cyclic GFR-binding peptide
  MOD_RES (15)..(16): Xaa is C or S
DLYLISIPELRAPVXXSAPAA

SEQ ID NO: 9173 - protein, 15 aa, Artificial Sequence
  Cyclic GFR-binding peptide
VVKENEDLYLMSIPE

SEQ ID NO: 9174 - protein, 21 aa, Artificial Sequence
  Cyclic GFR-binding peptide
  MOD_RES (15)..(16): Xaa is C or S
DIYLVSIPSLKTPVXXAKGVK

SEQ ID NO: 9175 - protein, 19 aa, Artificial Sequence
  Cyclic GFR-binding peptide
  MOD_RES (14)..(15): Xaa is C or S
LYLVSIPELKTPAXXPKPV

SEQ ID NO: 9176 - protein, 26 aa, Artificial Sequence
  Cyclic GFR-binding peptide
  MOD_RES (20)..(21): Xaa is C or S
VNNAADLYLISIPELRAPVXXSAPAA

SEQ ID NO: 9177 - protein, 23 aa, Artificial Sequence
  Cyclic GFR-binding peptide
  MOD_RES (17)..(17): Xaa is C or S
SDDLYLVSIPELKTPAXTPKTVH

SEQ ID NO: 9178 - protein, 17 aa, Artificial Sequence
  Cyclic GFR-binding peptide
  MOD_RES (14)..(15): Xaa is C or S
LYLISIPELRAPVXXSA

SEQ ID NO: 9179 - protein, 15 aa, Artificial Sequence
  Cyclic GFR-binding peptide
VKPTRGVIYLISIPS

SEQ ID NO: 9180 - protein, 18 aa, Artificial Sequence
  Cyclic GFR-binding peptide
  MOD_RES (14)..(15): Xaa is C or S
IYLMSIPSLETPVXXAKP

SEQ ID NO: 9181 - protein, 19 aa, Artificial Sequence
  Cyclic GFR-binding peptide
  MOD_RES (14)..(15): Xaa is C or S
LYLVSIPELKTPVXXAKGV

SEQ ID NO: 9182 - protein, 25 aa, Artificial Sequence
  Cyclic GFR-binding peptide
  MOD_RES (19)..(20): Xaa is C or S
PKRGVIYLISIPSLAQPVXXPAASA

SEQ ID NO: 9183 - protein, 24 aa, Artificial Sequence
  Cyclic GFR-binding peptide
  MOD_RES (18)..(19): Xaa is C or S
DYEDLYLMSIPELETPVXXAKPIS

SEQ ID NO: 9184 - protein, 24 aa, Artificial Sequence
  Cyclic GFR-binding peptide
  MOD_RES (18)..(19): Xaa is C or S
VGKDIYLISIPSLKTPVXXAKSAK

SEQ ID NO: 9185 - protein, 24 aa, Artificial Sequence
  Cyclic GFR-binding peptide
  MOD_RES (18)..(19): Xaa is C or S
TKGILYLISIPELDQSVXXPSASA

SEQ ID NO: 9186 - protein, 16 aa, Artificial Sequence
  Cyclic GFR-binding peptide
  MOD_RES (14)..(15): Xaa is C or S
LYLISIPELDQPVXXP

SEQ ID NO: 9187 - protein, 24 aa, Artificial Sequence
  Cyclic GFR-binding peptide
  MOD_RES (18)..(19): Xaa is C or S
SSDDIYLVSIPSLQTPAXXPKPVT

SEQ ID NO: 9188 - protein, 16 aa, Artificial Sequence
  Cyclic GFR-binding peptide
VKPKRGVIYLISIPSL

SEQ ID NO: 9189 - protein, 20 aa, Artificial Sequence
  Cyclic GFR-binding peptide
  MOD_RES (14)..(15): Xaa is C or S
LYLISIPELDQSVXXPSASA

SEQ ID NO: 9190 - protein, 16 aa, Artificial Sequence
  Cyclic GFR-binding peptide
VKPTRGVLYLISIPEL

SEQ ID NO: 9191 - protein, 15 aa, Artificial Sequence
  Cyclic GFR-binding peptide
VVNNAADFYLISIAN

SEQ ID NO: 9192 - protein, 26 aa, Artificial Sequence
  Cyclic GFR-binding peptide
  MOD_RES (20)..(21): Xaa is C or S
VNNSSDIYLVSIPSLKTPAXXAKPVA

SEQ ID NO: 9193 - protein, 13 aa, Artificial Sequence
  Cyclic GFR-binding peptide
FYLISIANLRAPV

SEQ ID NO: 9194 - protein, 20 aa, Artificial Sequence
  Cyclic GFR-binding peptide
  MOD_RES (14)..(15): Xaa is C or S
LYLMSIPELETPVXXAKPIS

SEQ ID NO: 9195 - protein, 20 aa, Artificial Sequence
  Cyclic GFR-binding peptide
  MOD_RES (14)..(15): Xaa is C or S
LYLISIPELRAPVXXSAPAA

SEQ ID NO: 9196 - protein, 20 aa, Artificial Sequence
  Cyclic GFR-binding peptide
  MOD_RES (14)..(14): Xaa is C or S
LYLVSIPELKTPAXTPKTVH

SEQ ID NO: 9197 - protein, 15 aa, Artificial Sequence
  Cyclic GFR-binding peptide
  MOD_RES (14)..(15): Xaa is C or S
KYLISIPSLRAPVXX

SEQ ID NO: 9198 - protein, 25 aa, Artificial Sequence
  Cyclic GFR-binding peptide
  MOD_RES (19)..(20): Xaa is C or S
VGMDDLYLVSIPELKTPVXXAKGVK

SEQ ID NO: 9199 - protein, 15 aa, Artificial Sequence
  Cyclic GFR-binding peptide
  MOD_RES (14)..(14): Xaa is C or S
LYLVSIPELKTPAXT

SEQ ID NO: 9200 - protein, 26 aa, Artificial Sequence
  Cyclic GFR-binding peptide
  MOD_RES (20)..(21): Xaa is C or S
VKENEDIYLMSIPSLETPVXXAKPIK

SEQ ID NO: 9201 - protein, 23 aa, Artificial Sequence
  Cyclic GFR-binding peptide
  MOD_RES (17)..(18): Xaa is C or S
AADKYLISIPSLRAPVXXSAPAA

SEQ ID NO: 9202 - protein, 25 aa, Artificial Sequence
  Cyclic GFR-binding peptide
  MOD_RES (19)..(20): Xaa is C or S
NSSDDIYLVSIPSLKTPAXXPKPVY

SEQ ID NO: 9203 - protein, 19 aa, Artificial Sequence
  Cyclic GFR-binding peptide
TPVGMDDLYLVSIPELKTP

SEQ ID NO: 9204 - protein, 22 aa, Artificial Sequence
  Cyclic GFR-binding peptide
  MOD_RES (16)..(17): Xaa is C or S
GVIYLISIPSLDQPVXXPSASA

SEQ ID NO: 9205 - protein, 18 aa, Artificial Sequence
  Cyclic GFR-binding peptide
  MOD_RES (14)..(15): Xaa is C or S
FYLISIANLRAPVXXSAP

SEQ ID NO: 9206 - protein, 18 aa, Artificial Sequence
  Cyclic GFR-binding peptide
VVKENEDIYLMSIPSLET

SEQ ID NO: 9207 - protein, 19 aa, Artificial Sequence
  Cyclic GFR-binding peptide
VVKENEDLYLMSIPELETP

SEQ ID NO: 9208 - protein, 15 aa, Artificial Sequence
  Cyclic GFR-binding peptide
YTVVGKDIYLISIPS

SEQ ID NO: 9209 - protein, 13 aa, Artificial Sequence
  Cyclic GFR-binding peptide
LYLVSIPELKTPV

SEQ ID NO: 9210 - protein, 15 aa, Artificial Sequence
  Cyclic GFR-binding peptide
VVNNAADKYLISIPS

SEQ ID NO: 9211 - protein, 13 aa, Artificial Sequence
  Cyclic GFR-binding peptide
KYLISIPSLRAPV

SEQ ID NO: 9212 - protein, 21 aa, Artificial Sequence
  Cyclic GFR-binding peptide
  MOD_RES (15)..(16): Xaa is C or S
DLYLVSIPELKTPAXXAKPVA

SEQ ID NO: 9213 - protein, 23 aa, Artificial Sequence
  Cyclic GFR-binding peptide
  MOD_RES (17)..(18): Xaa is C or S
NEDLYLMSIPELETPVXXAKPIK

SEQ ID NO: 9214 - protein, 15 aa, Artificial Sequence
  Cyclic GFR-binding peptide
  MOD_RES (14)..(15): Xaa is C or S
LYLVSIPELKTPVXX

SEQ ID NO: 9215 - protein, 25 aa, Artificial Sequence
  Cyclic GFR-binding peptide
  MOD_RES (19)..(20): Xaa is C or S
VVGKDFYLISIANLKTPVXXAKSAK

SEQ ID NO: 9216 - protein, 17 aa, Artificial Sequence
  Cyclic GFR-binding peptide
  MOD_RES (14)..(15): Xaa is C or S
IYLISIPSLAQPVXXPA

SEQ ID NO: 9217 - protein, 15 aa, Artificial Sequence
  Cyclic GFR-binding peptide
  MOD_RES (14)..(15): Xaa is C or S
FYLISIANLRAPVXX

SEQ ID NO: 9218 - protein, 21 aa, Artificial Sequence
  Cyclic GFR-binding peptide
  MOD_RES (15)..(16): Xaa is C or S
DLYLVSIPELKTPAXXPKPVY

SEQ ID NO: 9219 - protein, 19 aa, Artificial Sequence
  Cyclic GFR-binding peptide
IKPTKGIIYLISIPSLDQS

SEQ ID NO: 9220 - protein, 18 aa, Artificial Sequence
  Cyclic GFR-binding peptide
  MOD_RES (14)..(15): Xaa is C or S
IYLVSIPSLKTPVXXAKG

SEQ ID NO: 9221 - protein, 18 aa, Artificial Sequence
  Cyclic GFR-binding peptide
TPVGMDDIYLVSIPSLKT

SEQ ID NO: 9222 - protein, 26 aa, Artificial Sequence
  Cyclic GFR-binding peptide
  MOD_RES (20)..(21): Xaa is C or S
PVGMDDIYLVSIPSLKTPVXXAKGVK

SEQ ID NO: 9223 - protein, 21 aa, Artificial Sequence
  Cyclic GFR-binding peptide
  MOD_RES (15)..(16): Xaa is C or S
VIYLISIPSLDQPVXXPSASA

SEQ ID NO: 9224 - protein, 18 aa, Artificial Sequence
  Cyclic GFR-binding peptide
  MOD_RES (14)..(15): Xaa is C or S
IYLISIPSLDQPVXXPSA

SEQ ID NO: 9225 - protein, 16 aa, Artificial Sequence
  Cyclic GFR-binding peptide
VKPTRGVIYLISIPSL

SEQ ID NO: 9226 - protein, 17 aa, Artificial Sequence
  Cyclic GFR-binding peptide
  MOD_RES (14)..(15): Xaa is C or S
IYLISIPSLDQPVXXPS

SEQ ID NO: 9227 - protein, 16 aa, Artificial Sequence
  Cyclic GFR-binding peptide
  MOD_RES (14)..(15): Xaa is C or S
IYLISIPSLAQPVXXP

SEQ ID NO: 9228 - protein, 16 aa, Artificial Sequence
  Cyclic GFR-binding peptide
  MOD_RES (14)..(15): Xaa is C or S
LYLVSIPELQTPAXXP

SEQ ID NO: 9229 - protein, 17 aa, Artificial Sequence
  Cyclic GFR-binding peptide
TPVGMDDLYLVSIPELK

SEQ ID NO: 9230 - protein, 24 aa, Artificial Sequence
  Cyclic GFR-binding peptide
  MOD_RES (18)..(19): Xaa is C or S
KRGVIYLISIPSLAQPVXXPAASA

SEQ ID NO: 9231 - protein, 18 aa, Artificial Sequence
  Cyclic GFR-binding peptide
VVKDYEDLYLMSIPELET

SEQ ID NO: 9232 - protein, 18 aa, Artificial Sequence
  Cyclic GFR-binding peptide
IVNNSSDLYLVSIPELKT

SEQ ID NO: 9233 - protein, 27 aa, Artificial Sequence
  Cyclic GFR-binding peptide
  MOD_RES (21)..(22): Xaa is C or S
IVNSSDDLYLVSIPELKTPAXXPKPVY

SEQ ID NO: 9234 - protein, 17 aa, Artificial Sequence
  Cyclic GFR-binding peptide
  MOD_RES (14)..(15): Xaa is C or S
LYLVSIPELKTPAXXPK

SEQ ID NO: 9235 - protein, 15 aa, Artificial Sequence
  Cyclic GFR-binding peptide
IKPTKGIIYLISIPS

SEQ ID NO: 9236 - protein, 25 aa, Artificial Sequence
  Cyclic GFR-binding peptide
  MOD_RES (19)..(20): Xaa is C or S
KENEDIYLMSIPSLETPVXXAKPIK

SEQ ID NO: 9237 - protein, 22 aa, Artificial Sequence
  Cyclic GFR-binding peptide
  MOD_RES (16)..(17): Xaa is C or S
GVLYLISIPELDQPVXXPSASA

SEQ ID NO: 9238 - protein, 24 aa, Artificial Sequence
  Cyclic GFR-binding peptide
  MOD_RES (18)..(19): Xaa is C or S
VGKDKYLISIPSLKTPVXXAKSAK

SEQ ID NO: 9239 - protein, 17 aa, Artificial Sequence
  Cyclic GFR-binding peptide
YTVVGKDIYLISIPSLK

SEQ ID NO: 9240 - protein, 16 aa, Artificial Sequence
  Cyclic GFR-binding peptide
VVKENEDLYLMSIPEL

SEQ ID NO: 9241 - protein, 18 aa, Artificial Sequence
  Cyclic GFR-binding peptide
  MOD_RES (14)..(15): Xaa is C or S
LYLISIPELDQPVXXPSA

SEQ ID NO: 9242 - protein, 16 aa, Artificial Sequence
  Cyclic GFR-binding peptide
IVNSSDDIYLVSIPSL

SEQ ID NO: 9243 - protein, 20 aa, Artificial Sequence
  Cyclic GFR-binding peptide
  MOD_RES (14)..(15): Xaa is C or S
LYLISIPELAQPVXXPAASA

SEQ ID NO: 9244 - protein, 17 aa, Artificial Sequence
  Cyclic GFR-binding peptide
VVKENEDLYLMSIPELE

SEQ ID NO: 9245 - protein, 16 aa, Artificial Sequence
  Cyclic GFR-binding peptide
YTVVGKDIYLISIPSL

SEQ ID NO: 9246 - protein, 17 aa, Artificial Sequence
  Cyclic GFR-binding peptide
IVNSSDDIYLVSIPSLK

SEQ ID NO: 9247 - protein, 17 aa, Artificial Sequence
  Cyclic GFR-binding peptide
IVNSSDDIYLVSIPSLQ

SEQ ID NO: 9248 - protein, 27 aa, Artificial Sequence
  Cyclic GFR-binding peptide
  MOD_RES (21)..(22): Xaa is C or S
VKPTRGVLYLISIPELDQPVXXPSASA

SEQ ID NO: 9249 - protein, 20 aa, Artificial Sequence
  Cyclic GFR-binding peptide
  MOD_RES (14)..(15): Xaa is C or S
IYLVSIPSLKTPVXXAKGVK

SEQ ID NO: 9250 - protein, 26 aa, Artificial Sequence
  Cyclic GFR-binding peptide
  MOD_RES (20)..(21): Xaa is C or S
VKDYEDIYLMSIPSLETPVXXAKPIS

SEQ ID NO: 9251 - protein, 17 aa, Artificial Sequence
  Cyclic GFR-binding peptide
  MOD_RES (14)..(15): Xaa is C or S
LYLMSIPELETPVXXAK

SEQ ID NO: 9252 - protein, 15 aa, Artificial Sequence
  Cyclic GFR-binding peptide
  MOD_RES (14)..(14): Xaa is C or S
IYLVSIPSLKTPAXT

SEQ ID NO: 9253 - protein, 24 aa, Artificial Sequence
  Cyclic GFR-binding peptide
  MOD_RES (18)..(19): Xaa is C or S
SSDDIYLVSIPSLKTPAXXPKPVY

SEQ ID NO: 9254 - protein, 15 aa, Artificial Sequence
  Cyclic GFR-binding peptide
VKPTRGVLYLISIPE

SEQ ID NO: 9255 - protein, 24 aa, Artificial Sequence
  Cyclic GFR-binding peptide
  MOD_RES (18)..(19): Xaa is C or S
SSDDLYLVSIPELQTPAXXPKPVT

SEQ ID NO: 9256 - protein, 13 aa, Artificial Sequence
  Cyclic GFR-binding peptide
LYLVSIPELKTPA

SEQ ID NO: 9257 - protein, 26 aa, Artificial Sequence
  Cyclic GFR-binding peptide
  MOD_RES (20)..(21): Xaa is C or S
KPKRGVIYLISIPSLAQPVXXPAASA

SEQ ID NO: 9258 - protein, 22 aa, Artificial Sequence
  Cyclic GFR-binding peptide
  MOD_RES (16)..(17): Xaa is C or S
ADKYLISIPSLRAPVXXSAPAA

SEQ ID NO: 9259 - protein, 22 aa, Artificial Sequence
  Cyclic GFR-binding peptide
  MOD_RES (16)..(17): Xaa is C or S
ADLYLISIPELRAPVXXSAPAA

SEQ ID NO: 9260 - protein, 16 aa, Artificial Sequence
  Cyclic GFR-binding peptide
TPVGMDDLYLVSIPEL

SEQ ID NO: 9261 - protein, 15 aa, Artificial Sequence
  Cyclic GFR-binding peptide
  MOD_RES (14)..(15): Xaa is C or S
IYLMSIPSLETPVXX

SEQ ID NO: 9262 - protein, 26 aa, Artificial Sequence
  Cyclic GFR-binding peptide
  MOD_RES (20)..(21): Xaa is C or S
VNNAADKYLISIPSLRAPVXXSAPAA

SEQ ID NO: 9263 - protein, 21 aa, Artificial Sequence
  Cyclic GFR-binding peptide
  MOD_RES (15)..(16): Xaa is C or S
DIYLVSIPSLKTPAXXAKPVA

SEQ ID NO: 9264 - protein, 19 aa, Artificial Sequence
  Cyclic GFR-binding peptide
YTVVGKDIYLISIPSLKTP

SEQ ID NO: 9265 - protein, 26 aa, Artificial Sequence
  Cyclic GFR-binding peptide
  MOD_RES (20)..(21): Xaa is C or S
VNSSDDLYLVSIPELKTPAXXPKPVY

SEQ ID NO: 9266 - protein, 14 aa, Artificial Sequence
  Cyclic GFR-binding peptide
  MOD_RES (14)..(14): Xaa is C or S
IYLMSIPSLETPVX

SEQ ID NO: 9267 - protein, 16 aa, Artificial Sequence
  Cyclic GFR-binding peptide
  MOD_RES (14)..(15): Xaa is C or S
IYLISIPSLDQSVXXP

SEQ ID NO: 9268 - protein, 23 aa, Artificial Sequence
  Cyclic GFR-binding peptide
  MOD_RES (17)..(18): Xaa is C or S
SDDLYLVSIPELQTPAXXPKPVT

SEQ ID NO: 9269 - protein, 14 aa, Artificial Sequence
  Cyclic GFR-binding peptide
  MOD_RES (14)..(14): Xaa is C or S
LYLVSIPELKTPAX

SEQ ID NO: 9270 - protein, 18 aa, Artificial Sequence
  Cyclic GFR-binding peptide
  MOD_RES (14)..(15): Xaa is C or S
KYLISIPSLKTPVXXAKS

SEQ ID NO: 9271 - protein, 18 aa, Artificial Sequence
  Cyclic GFR-binding peptide
  MOD_RES (14)..(15): Xaa is C or S
IYLISIPSLKTPVXXAKS

SEQ ID NO: 9272 - protein, 15 aa, Artificial Sequence
  Cyclic GFR-binding peptide
VKPKRGVIYLISIPS

SEQ ID NO: 9273 - protein, 27 aa, Artificial Sequence
  Cyclic GFR-binding peptide
  MOD_RES (21)..(22): Xaa is C or S
VKPTRGVIYLISIPSLDQPVXXPSASA

SEQ ID NO: 9274 - protein, 14 aa, Artificial Sequence
  Cyclic GFR-binding peptide
  MOD_RES (14)..(14): Xaa is C or S
KYLISIPSLRAPVX

SEQ ID NO: 9275 - protein, 20 aa, Artificial Sequence
  Cyclic GFR-binding peptide
  MOD_RES (14)..(15): Xaa is C or S
LYLMSIPELETPVXXAKPIK

SEQ ID NO: 9276 - protein, 16 aa, Artificial Sequence
  Cyclic GFR-binding peptide
  MOD_RES (14)..(15): Xaa is C or S
LYLVSIPELKTPVXXA

SEQ ID NO: 9277 - protein, 24 aa, Artificial Sequence
  Cyclic GFR-binding peptide
  MOD_RES (18)..(19): Xaa is C or S
SSDDLYLVSIPELKTPAXXPKPVY

SEQ ID NO: 9278 - protein, 26 aa, Artificial Sequence
  Cyclic GFR-binding peptide
  MOD_RES (20)..(21): Xaa is C or S
TVVGKDIYLISIPSLKTPVXXAKSAK

SEQ ID NO: 9279 - protein, 26 aa, Artificial Sequence
  Cyclic GFR-binding peptide
  MOD_RES (20)..(21): Xaa is C or S
VKDYEDLYLMSIPELETPVXXAKPIS

SEQ ID NO: 9280 - protein, 25 aa, Artificial Sequence
  Cyclic GFR-binding peptide
  MOD_RES (19)..(20): Xaa is C or S
PTKGILYLISIPELDQSVXXPSASA

SEQ ID NO: 9281 - protein, 18 aa, Artificial Sequence
  Cyclic GFR-binding peptide
  MOD_RES (14)..(15): Xaa is C or S
LYLVSIPELQTPAXXPKP

SEQ ID NO: 9282 - protein, 17 aa, Artificial Sequence
  Cyclic GFR-binding peptide
  MOD_RES (14)..(15): Xaa is C or S
FYLISIANLKTPVXXAK

SEQ ID NO: 9283 - protein, 20 aa, Artificial Sequence
  Cyclic GFR-binding peptide
  MOD_RES (14)..(15): Xaa is C or S
KYLISIPSLRAPVXXSAPAA

SEQ ID NO: 9284 - protein, 16 aa, Artificial Sequence
  Cyclic GFR-binding peptide
VVNNAADFYLISIANL

SEQ ID NO: 9285 - protein, 16 aa, Artificial Sequence
  Cyclic GFR-binding peptide
  MOD_RES (14)..(15): Xaa is C or S
LYLISIPELRAPVXXS

SEQ ID NO: 9286 - protein, 19 aa, Artificial Sequence
  Cyclic GFR-binding peptide
  MOD_RES (14)..(14): Xaa is C or S
LYLVSIPELKTPAXTPKTV

SEQ ID NO: 9287 - protein, 26 aa, Artificial Sequence
  Cyclic GFR-binding peptide
  MOD_RES (20)..(21): Xaa is C or S
KPKRGVLYLISIPELAQPVXXPAASA

SEQ ID NO: 9288 - protein, 15 aa, Artificial Sequence
  Cyclic GFR-binding peptide
IVNSSDDIYLVSIPS

SEQ ID NO: 9289 - protein, 17 aa, Artificial Sequence
  Cyclic GFR-binding peptide
  MOD_RES (14)..(15): Xaa is C or S
IYLISIPSLDQSVXXPS

SEQ ID NO: 9290 - protein, 21 aa, Artificial Sequence
  Cyclic GFR-binding peptide
  MOD_RES (15)..(16): Xaa is C or S
ILYLISIPELDQSVXXPSASA

SEQ ID NO: 9291 - protein, 21 aa, Artificial Sequence
  Cyclic GFR-binding peptide
  MOD_RES (15)..(16): Xaa is C or S
VLYLISIPELDQPVXXPSASA

SEQ ID NO: 9292 - protein, 21 aa, Artificial Sequence
  Cyclic GFR-binding peptide
  MOD_RES (15)..(16): Xaa is C or S
DLYLVSIPELKTPVXXAKGVK

SEQ ID NO: 9293 - protein, 16 aa, Artificial Sequence
  Cyclic GFR-binding peptide
VVNNAADKYLISIPSL

SEQ ID NO: 9294 - protein, 20 aa, Artificial Sequence
  Cyclic GFR-binding peptide
  MOD_RES (14)..(15): Xaa is C or S
FYLISIANLRAPVXXSAPAA

SEQ ID NO: 9295 - protein, 26 aa, Artificial Sequence
  Cyclic GFR-binding peptide
  MOD_RES (20)..(21): Xaa is C or S
KPTKGIIYLISIPSLDQSVXXPSASA

SEQ ID NO: 9296 - protein, 18 aa, Artificial Sequence
  Cyclic GFR-binding peptide
  MOD_RES (14)..(15): Xaa is C or S
LYLISIPELDQSVXXPSA

SEQ ID NO: 9297 - protein, 19 aa, Artificial Sequence
  Cyclic GFR-binding peptide
  MOD_RES (14)..(15): Xaa is C or S
IYLMSIPSLETPVXXAKPI

SEQ ID NO: 9298 - protein, 19 aa, Artificial Sequence
  Cyclic GFR-binding peptide
IVNNSSDLYLVSIPELKTP

SEQ ID NO: 9299 - protein, 27 aa, Artificial Sequence
  Cyclic GFR-binding peptide
  MOD_RES (21)..(22): Xaa is C or S
IKPTKGILYLISIPELDQSVXXPSASA

SEQ ID NO: 9300 - protein, 17 aa, Artificial Sequence
  Cyclic GFR-binding peptide
  MOD_RES (14)..(15): Xaa is C or S
KYLISIPSLRAPVXXSA

SEQ ID NO: 9301 - protein, 17 aa, Artificial Sequence
  Cyclic GFR-binding peptide
VVKENEDIYLMSIPSLE

SEQ ID NO: 9302 - protein, 16 aa, Artificial Sequence
  Cyclic GFR-binding peptide
  MOD_RES (14)..(15): Xaa is C or S
IYLMSIPSLETPVXXA

SEQ ID NO: 9303 - protein, 23 aa, Artificial Sequence
  Cyclic GFR-binding peptide
  MOD_RES (17)..(18): Xaa is C or S
SDDIYLVSIPSLKTPAXXPKPVY

SEQ ID NO: 9304 - protein, 15 aa, Artificial Sequence
  Cyclic GFR-binding peptide
YTVVGKDKYLISIPS

SEQ ID NO: 9305 - protein, 19 aa, Artificial Sequence
  Cyclic GFR-binding peptide
IKPTKGILYLISIPELDQS

SEQ ID NO: 9306 - protein, 18 aa, Artificial Sequence
  Cyclic GFR-binding peptide
VVKDYEDIYLMSIPSLET

SEQ ID NO: 9307 - protein, 15 aa, Artificial Sequence
  Cyclic GFR-binding peptide
VKPKRGVLYLISIPE

SEQ ID NO: 9308 - protein, 23 aa, Artificial Sequence
  Cyclic GFR-binding peptide
  MOD_RES (17)..(18): Xaa is C or S
GKDIYLISIPSLKTPVXXAKSAK

SEQ ID NO: 9309 - protein, 14 aa, Artificial Sequence
  Cyclic GFR-binding peptide
  MOD_RES (14)..(14): Xaa is C or S
IYLISIPSLDQSVX

SEQ ID NO: 9310 - protein, 13 aa, Artificial Sequence
  Cyclic GFR-binding peptide
IYLMSIPSLETPV

SEQ ID NO: 9311 - protein, 27 aa, Artificial Sequence
  Cyclic GFR-binding peptide
  MOD_RES (21)..(22): Xaa is C or S
VVKDYEDIYLMSIPSLETPVXXAKPIS

SEQ ID NO: 9312 - protein, 26 aa, Artificial Sequence
  Cyclic GFR-binding peptide
  MOD_RES (20)..(21): Xaa is C or S
VNSSDDLYLVSIPELQTPAXXPKPVT

SEQ ID NO: 9313 - protein, 21 aa, Artificial Sequence
  Cyclic GFR-binding peptide
  MOD_RES (15)..(15): Xaa is C or S
DLYLVSIPELKTPAXTPKTVH

SEQ ID NO: 9314 - protein, 13 aa, Artificial Sequence
  Cyclic GFR-binding peptide
IYLVSIPSLKTPV

SEQ ID NO: 9315 - protein, 18 aa, Artificial Sequence
  Cyclic GFR-binding peptide
IVNNSSDIYLVSIPSLKT

SEQ ID NO: 9316 - protein, 17 aa, Artificial Sequence
  Cyclic GFR-binding peptide
YTVVGKDFYLISIANLK

SEQ ID NO: 9317 - protein, 19 aa, Artificial Sequence
  Cyclic GFR-binding peptide
  MOD_RES (14)..(15): Xaa is C or S
IYLVSIPSLKTPAXXAKPV

SEQ ID NO: 9318 - protein, 16 aa, Artificial Sequence
  Cyclic GFR-binding peptide
  MOD_RES (14)..(15): Xaa is C or S
IYLISIPSLKTPVXXA

SEQ ID NO: 9319 - protein, 18 aa, Artificial Sequence
  Cyclic GFR-binding peptide
VVKENEDLYLMSIPELET

SEQ ID NO: 9320 - protein, 16 aa, Artificial Sequence
  Cyclic GFR-binding peptide
  MOD_RES (14)..(15): Xaa is C or S
KYLISIPSLKTPVXXA

SEQ ID NO: 9321 - protein, 18 aa, Artificial Sequence
  Cyclic GFR-binding peptide
YTVVGKDIYLISIPSLKT

SEQ ID NO: 9322 - protein, 23 aa, Artificial Sequence
  Cyclic GFR-binding peptide
  MOD_RES (17)..(18): Xaa is C or S
SSDLYLVSIPELKTPAXXAKPVA

SEQ ID NO: 9323 - protein, 22 aa, Artificial Sequence
  Cyclic GFR-binding peptide
  MOD_RES (16)..(17): Xaa is C or S
ADFYLISIANLRAPVXXSAPAA

SEQ ID NO: 9324 - protein, 13 aa, Artificial Sequence
  Cyclic GFR-binding peptide
LYLISIPELAQPV

SEQ ID NO: 9325 - protein, 15 aa, Artificial Sequence
  Cyclic GFR-binding peptide
VVKENEDIYLMSIPS

SEQ ID NO: 9326 - protein, 15 aa, Artificial Sequence
  Cyclic GFR-binding peptide
  MOD_RES (14)..(15): Xaa is C or S
LYLISIPELRAPVXX

SEQ ID NO: 9327 - protein, 22 aa, Artificial Sequence
  Cyclic GFR-binding peptide
  MOD_RES (16)..(17): Xaa is C or S
EDIYLMSIPSLETPVXXAKPIK

SEQ ID NO: 9328 - protein, 23 aa, Artificial Sequence
  Cyclic GFR-binding peptide
  MOD_RES (17)..(18): Xaa is C or S
MDDLYLVSIPELKTPVXXAKGVK

SEQ ID NO: 9329 - protein, 26 aa, Artificial Sequence
  Cyclic GFR-binding peptide
  MOD_RES (20)..(20): Xaa is C or S
VNSSDDLYLVSIPELKTPAXTPKTVH

SEQ ID NO: 9330 - protein, 18 aa, Artificial Sequence
  Cyclic GFR-binding peptide
  MOD_RES (14)..(15): Xaa is C or S
LYLVSIPELKTPAXXAKP

SEQ ID NO: 9331 - protein, 19 aa, Artificial Sequence
  Cyclic GFR-binding peptide
  MOD_RES (14)..(15): Xaa is C or S
KYLISIPSLKTPVXXAKSA

SEQ ID NO: 9332 - protein, 26 aa, Artificial Sequence
  Cyclic GFR-binding peptide
  MOD_RES (20)..(21): Xaa is C or S
PVGMDDLYLVSIPELKTPVXXAKGVK

SEQ ID NO: 9333 - protein, 19 aa, Artificial Sequence
  Cyclic GFR-binding peptide
  MOD_RES (14)..(15): Xaa is C or S
IYLISIPSLKTPVXXAKSA

SEQ ID NO: 9334 - protein, 27 aa, Artificial Sequence
  Cyclic GFR-binding peptide
  MOD_RES (21)..(22): Xaa is C or S
YTVVGKDIYLISIPSLKTPVXXAKSAK

SEQ ID NO: 9335 - protein, 16 aa, Artificial Sequence
  Cyclic GFR-binding peptide
  MOD_RES (14)..(15): Xaa is C or S
IYLVSIPSLKTPAXXA

SEQ ID NO: 9336 - protein, 25 aa, Artificial Sequence
  Cyclic GFR-binding peptide
  MOD_RES (19)..(20): Xaa is C or S
NNAADKYLISIPSLRAPVXXSAPAA

SEQ ID NO: 9337 - protein, 23 aa, Artificial Sequence
  Cyclic GFR-binding peptide
  MOD_RES (17)..(18): Xaa is C or S
RGVLYLISIPELAQPVXXPAASA

SEQ ID NO: 9338 - protein, 17 aa, Artificial Sequence
  Cyclic GFR-binding peptide
VKPKRGVIYLISIPSLA

SEQ ID NO: 9339 - protein, 18 aa, Artificial Sequence
  Cyclic GFR-binding peptide
VKPTRGVLYLISIPELDQ

SEQ ID NO: 9340 - protein, 27 aa, Artificial Sequence
  Cyclic GFR-binding peptide
  MOD_RES (21)..(22): Xaa is C or S
IVNNSSDLYLVSIPELKTPAXXAKPVA

SEQ ID NO: 9341 - protein, 16 aa, Artificial Sequence
  Cyclic GFR-binding peptide
  MOD_RES (14)..(15): Xaa is C or S
IYLISIPSLDQPVXXP

SEQ ID NO: 9342 - protein, 16 aa, Artificial Sequence
  Cyclic GFR-binding peptide
TPVGMDDIYLVSIPSL

SEQ ID NO: 9343 - protein, 15 aa, Artificial Sequence
  Cyclic GFR-binding peptide
  MOD_RES (14)..(15): Xaa is C or S
IYLISIPSLDQSVXX

SEQ ID NO: 9344 - protein, 18 aa, Artificial Sequence
  Cyclic GFR-binding peptide
  MOD_RES (14)..(15): Xaa is C or S
KYLISIPSLRAPVXXSAP

SEQ ID NO: 9345 - protein, 15 aa, Artificial Sequence
  Cyclic GFR-binding peptide
IKPTKGILYLISIPE

SEQ ID NO: 9346 - protein, 25 aa, Artificial Sequence
  Cyclic GFR-binding peptide
  MOD_RES (19)..(20): Xaa is C or S
NSSDDIYLVSIPSLQTPAXXPKPVT

SEQ ID NO: 9347 - protein, 17 aa, Artificial Sequence
  Cyclic GFR-binding peptide
  MOD_RES (14)..(14): Xaa is C or S
IYLVSIPSLKTPAXTPK

SEQ ID NO: 9348 - protein, 26 aa, Artificial Sequence
  Cyclic GFR-binding peptide
  MOD_RES (20)..(20): Xaa is C or S
VNSSDDIYLVSIPSLKTPAXTPKTVH

SEQ ID NO: 9349 - protein, 27 aa, Artificial Sequence
  Cyclic GFR-binding peptide
  MOD_RES (21)..(22): Xaa is C or S
VKPKRGVIYLISIPSLAQPVXXPAASA

SEQ ID NO: 9350 - protein, 25 aa, Artificial Sequence
  Cyclic GFR-binding peptide
  MOD_RES (19)..(20): Xaa is C or S
VVGKDIYLISIPSLKTPVXXAKSAK

SEQ ID NO: 9351 - protein, 19 aa, Artificial Sequence
  Cyclic GFR-binding peptide
TPVGMDDIYLVSIPSLKTP

SEQ ID NO: 9352 - protein, 20 aa, Artificial Sequence
  Cyclic GFR-binding peptide
  MOD_RES (14)..(15): Xaa is C or S
LYLVSIPELKTPAXXAKPVA

SEQ ID NO: 9353 - protein, 15 aa, Artificial Sequence
  Cyclic GFR-binding peptide
  MOD_RES (14)..(15): Xaa is C or S
IYLISIPSLAQPVXX

SEQ ID NO: 9354 - protein, 23 aa, Artificial Sequence
  Cyclic GFR-binding peptide
  MOD_RES (17)..(18): Xaa is C or S
RGVIYLISIPSLDQPVXXPSASA

SEQ ID NO: 9355 - protein, 21 aa, Artificial Sequence
  Cyclic GFR-binding peptide
  MOD_RES (15)..(16): Xaa is C or S
DLYLMSIPELETPVXXAKPIS

SEQ ID NO: 9356 - protein, 26 aa, Artificial Sequence
  Cyclic GFR-binding peptide
  MOD_RES (20)..(21): Xaa is C or S
VKENEDLYLMSIPELETPVXXAKPIK

SEQ ID NO: 9357 - protein, 18 aa, Artificial Sequence
  Cyclic GFR-binding peptide
IVNSSDDLYLVSIPELKT

SEQ ID NO: 9358 - protein, 14 aa, Artificial Sequence
  Cyclic GFR-binding peptide
  MOD_RES (14)..(14): Xaa is C or S
LYLISIPELRAPVX

SEQ ID NO: 9359 - protein, 18 aa, Artificial Sequence
  Cyclic GFR-binding peptide
  MOD_RES (14)..(15): Xaa is C or S
IYLISIPSLAQPVXXPAA

SEQ ID NO: 9360 - protein, 18 aa, Artificial Sequence
  Cyclic GFR-binding peptide
IVNSSDDLYLVSIPELQT

SEQ ID NO: 9361 - protein, 26 aa, Artificial Sequence
  Cyclic GFR-binding peptide
  MOD_RES (20)..(21): Xaa is C or S
TVVGKDFYLISIANLKTPVXXAKSAK

SEQ ID NO: 9362 - protein, 23 aa, Artificial Sequence
  Cyclic GFR-binding peptide
  MOD_RES (17)..(18): Xaa is C or S
AADFYLISIANLRAPVXXSAPAA

SEQ ID NO: 9363 - protein, 18 aa, Artificial Sequence
  Cyclic GFR-binding peptide
  MOD_RES (14)..(15): Xaa is C or S
IYLVSIPSLQTPAXXPKP

SEQ ID NO: 9364 - protein, 13 aa, Artificial Sequence
  Cyclic GFR-binding peptide
IYLVSIPSLQTPA

SEQ ID NO: 9365 - protein, 21 aa, Artificial Sequence
  Cyclic GFR-binding peptide
  MOD_RES (15)..(16): Xaa is C or S
DLYLVSIPELQTPAXXPKPVT

SEQ ID NO: 9366 - protein, 13 aa, Artificial Sequence
  Cyclic GFR-binding peptide
IYLISIPSLKTPV

SEQ ID NO: 9367 - protein, 13 aa, Artificial Sequence
  Cyclic GFR-binding peptide
KYLISIPSLKTPV

SEQ ID NO: 9368 - protein, 27 aa, Artificial Sequence
  Cyclic GFR-binding peptide
  MOD_RES (21)..(22): Xaa is C or S
YTVVGKDFYLISIANLKTPVXXAKSAK

SEQ ID NO: 9369 - protein, 24 aa, Artificial Sequence
  Cyclic GFR-binding peptide
  MOD_RES (18)..(19): Xaa is C or S
VGKDFYLISIANLKTPVXXAKSAK

SEQ ID NO: 9370 - protein, 23 aa, Artificial Sequence
  Cyclic GFR-binding peptide
  MOD_RES (17)..(18): Xaa is C or S
YEDIYLMSIPSLETPVXXAKPIS

SEQ ID NO: 9371 - protein, 14 aa, Artificial Sequence
  Cyclic GFR-binding peptide
  MOD_RES (14)..(14): Xaa is C or S
IYLISIPSLDQPVX

SEQ ID NO: 9372 - protein, 13 aa, Artificial Sequence
  Cyclic GFR-binding peptide
LYLISIPELDQSV

SEQ ID NO: 9373 - protein, 27 aa, Artificial Sequence
  Cyclic GFR-binding peptide
  MOD_RES (21)..(22): Xaa is C or S
IVNSSDDIYLVSIPSLQTPAXXPKPVT

SEQ ID NO: 9374 - protein, 18 aa, Artificial Sequence
  Cyclic GFR-binding peptide
  MOD_RES (14)..(14): Xaa is C or S
IYLVSIPSLKTPAXTPKT

SEQ ID NO: 9375 - protein, 17 aa, Artificial Sequence
  Cyclic GFR-binding peptide
VVKDYEDIYLMSIPSLE

SEQ ID NO: 9376 - protein, 19 aa, Artificial Sequence
  Cyclic GFR-binding peptide
VKPKRGVIYLISIPSLAQP

SEQ ID NO: 9377 - protein, 15 aa, Artificial Sequence
  Cyclic GFR-binding peptide
  MOD_RES (14)..(15): Xaa is C or S
IYLISIPSLDQPVXX

SEQ ID NO: 9378 - protein, 20 aa, Artificial Sequence
  Cyclic GFR-binding peptide
  MOD_RES (14)..(15): Xaa is C or S
IYLISIPSLAQPVXXPAASA

SEQ ID NO: 9379 - protein, 16 aa, Artificial Sequence
  Cyclic GFR-binding peptide
VVKDYEDLYLMSIPEL

SEQ ID NO: 9380 - protein, 16 aa, Artificial Sequence
  Cyclic GFR-binding peptide
  MOD_RES (14)..(15): Xaa is C or S
IYLVSIPSLKTPVXXA

SEQ ID NO: 9381 - protein, 18 aa, Artificial Sequence
  Cyclic GFR-binding peptide
IKPTKGILYLISIPELDQ

SEQ ID NO: 9382 - protein, 19 aa, Artificial Sequence
  Cyclic GFR-binding peptide
  MOD_RES (14)..(15): Xaa is C or S
LYLISIPELDQSVXXPSAS

SEQ ID NO: 9383 - protein, 17 aa, Artificial Sequence
  Cyclic GFR-binding peptide
  MOD_RES (14)..(15): Xaa is C or S
IYLVSIPSLKTPAXXPK

SEQ ID NO: 9384 - protein, 25 aa, Artificial Sequence
  Cyclic GFR-binding peptide
  MOD_RES (19)..(20): Xaa is C or S
NSSDDLYLVSIPELQTPAXXPKPVT

SEQ ID NO: 9385 - protein, 21 aa, Artificial Sequence
  Cyclic GFR-binding peptide
  MOD_RES (15)..(16): Xaa is C or S
DIYLVSIPSLKTPAXXPKPVY

SEQ ID NO: 9386 - protein, 17 aa, Artificial Sequence
  Cyclic GFR-binding peptide
  MOD_RES (14)..(15): Xaa is C or S
IYLVSIPSLQTPAXXPK

SEQ ID NO: 9387 - protein, 23 aa, Artificial Sequence
  Cyclic GFR-binding peptide
  MOD_RES (17)..(18): Xaa is C or S
SDDIYLVSIPSLQTPAXXPKPVT

SEQ ID NO: 9388 - protein, 14 aa, Artificial Sequence
  Cyclic GFR-binding peptide
  MOD_RES (14)..(14): Xaa is C or S
FYLISIANLRAPVX

SEQ ID NO: 9389 - protein, 25 aa, Artificial Sequence
  Cyclic GFR-binding peptide
  MOD_RES (19)..(20): Xaa is C or S
NNAADFYLISIANLRAPVXXSAPAA

SEQ ID NO: 9390 - protein, 14 aa, Artificial Sequence
  Cyclic GFR-binding peptide
  MOD_RES (14)..(14): Xaa is C or S
IYLISIPSLAQPVX

SEQ ID NO: 9391 - protein, 27 aa, Artificial Sequence
  Cyclic GFR-binding peptide
  MOD_RES (21)..(22): Xaa is C or S
YTVVGKDKYLISIPSLKTPVXXAKSAK

SEQ ID NO: 9392 - protein, 27 aa, Artificial Sequence
  Cyclic GFR-binding peptide
  MOD_RES (21)..(22): Xaa is C or S
TPVGMDDIYLVSIPSLKTPVXXAKGVK

SEQ ID NO: 9393 - protein, 18 aa, Artificial Sequence
  Cyclic GFR-binding peptide
  MOD_RES (14)..(15): Xaa is C or S
IYLVSIPSLKTPAXXPKP

SEQ ID NO: 9394 - protein, 19 aa, Artificial Sequence
  Cyclic GFR-binding peptide
VVKDYEDLYLMSIPELETP

SEQ ID NO: 9395 - protein, 25 aa, Artificial Sequence
  Cyclic GFR-binding peptide
  MOD_RES (19)..(20): Xaa is C or S
KDYEDLYLMSIPELETPVXXAKPIS

SEQ ID NO: 9396 - protein, 16 aa, Artificial Sequence
  Cyclic GFR-binding peptide
IKPTKGIIYLISIPSL

SEQ ID NO: 9397 - protein, 13 aa, Artificial Sequence
  Cyclic GFR-binding peptide
IYLVSIPSLKTPA

SEQ ID NO: 9398 - protein, 24 aa, Artificial Sequence
  Cyclic GFR-binding peptide
  MOD_RES (18)..(19): Xaa is C or S
TKGIIYLISIPSLDQSVXXPSASA

SEQ ID NO: 9399 - protein, 17 aa, Artificial Sequence
  Cyclic GFR-binding peptide
YTVVGKDKYLISIPSLK

SEQ ID NO: 9400 - protein, 15 aa, Artificial Sequence
  Cyclic GFR-binding peptide
TPVGMDDLYLVSIPE

SEQ ID NO: 9401 - protein, 20 aa, Artificial Sequence
  Cyclic GFR-binding peptide
  MOD_RES (14)..(15): Xaa is C or S
LYLVSIPELKTPAXXPKPVY

SEQ ID NO: 9402 - protein, 26 aa, Artificial Sequence
  Cyclic GFR-binding peptide
  MOD_RES (20)..(21): Xaa is C or S
KPTRGVIYLISIPSLDQPVXXPSASA

SEQ ID NO: 9403 - protein, 23 aa, Artificial Sequence
  Cyclic GFR-binding peptide
  MOD_RES (6)..(7): Xaa is C or S
ASASPXXVPQDLEPISILYLVGR

SEQ ID NO: 9404 - protein, 13 aa, Artificial Sequence
  Cyclic GFR-binding peptide
VPQDLEPISILYL

SEQ ID NO: 9405 - protein, 14 aa, Artificial Sequence
  Cyclic GFR-binding peptide
  MOD_RES (1)..(1): Xaa is C or S
XVPTKLNAISILYF

SEQ ID NO: 9406 - protein, 13 aa, Artificial Sequence
  Cyclic GFR-binding peptide
VPTELEPISMLYL

SEQ ID NO: 9407 - protein, 19 aa, Artificial Sequence
  Cyclic GFR-binding peptide
  MOD_RES (5)..(6): Xaa is C or S
APASXXVPARLSPISILYK

SEQ ID NO: 9408 - protein, 14 aa, Artificial Sequence
  Cyclic GFR-binding peptide
  MOD_RES (1)..(1): Xaa is C or S
XVSQDLEPISILYL

SEQ ID NO: 9409 - protein, 17 aa, Artificial Sequence
  Cyclic GFR-binding peptide
RLSPISILYKDAANNVV

SEQ ID NO: 9410 - protein, 19 aa, Artificial Sequence
  Cyclic GFR-binding peptide
PARLSPISILYKDAANNVV

SEQ ID NO: 9411 - protein, 26 aa, Artificial Sequence
  Cyclic GFR-binding peptide
  MOD_RES (6)..(7): Xaa is C or S
TVPKPXXAPTQLSPISVLYIDDSSNV

SEQ ID NO: 9412 - protein, 21 aa, Artificial Sequence
  Cyclic GFR-binding peptide
  MOD_RES (6)..(7): Xaa is C or S
KASKAXXVPTKLSPISILYKD

SEQ ID NO: 9413 - protein, 16 aa, Artificial Sequence
  Cyclic GFR-binding peptide
  MOD_RES (3)..(3): Xaa is C or S
PTXAPTKLEPISVLYL

SEQ ID NO: 9414 - protein, 19 aa, Artificial Sequence
  Cyclic GFR-binding peptide
PTKLEPISVLYLDDSSNVI

SEQ ID NO: 9415 - protein, 14 aa, Artificial Sequence
  Cyclic GFR-binding peptide
  MOD_RES (1)..(1): Xaa is C or S
XVPTKLSPISILYI

SEQ ID NO: 9416 - protein, 14 aa, Artificial Sequence
  Cyclic GFR-binding peptide
  MOD_RES (1)..(1): Xaa is C or S
XVPTKLSPISILYK

SEQ ID NO: 9417 - protein, 18 aa, Artificial Sequence
  Cyclic GFR-binding peptide
ARLEPISILYLDAANNVV

SEQ ID NO: 9418 - protein, 24 aa, Artificial Sequence
  Cyclic GFR-binding peptide
  MOD_RES (6)..(7): Xaa is C or S
KIPKAXXVPTELEPISMLYLDENE

SEQ ID NO: 9419 - protein, 18 aa, Artificial Sequence
  Cyclic GFR-binding peptide
TKLNAISILYFDKGVVTY

SEQ ID NO: 9420 - protein, 22 aa, Artificial Sequence
  Cyclic GFR-binding peptide
  MOD_RES (6)..(7): Xaa is C or S
AVPKAXXAPTKLEPISVLYLDS

SEQ ID NO: 9421 - protein, 22 aa, Artificial Sequence
  Cyclic GFR-binding peptide
  MOD_RES (6)..(7): Xaa is C or S
KVGKAXXVPTKLEPISVLYLDD

SEQ ID NO: 9422 - protein, 19 aa, Artificial Sequence
  Cyclic GFR-binding peptide
PQDLEPISILYLVGRTPKV

SEQ ID NO: 9423 - protein, 17 aa, Artificial Sequence
  Cyclic GFR-binding peptide
  MOD_RES (3)..(4): Xaa is C or S
SPXXVSQDLEPISILYL

SEQ ID NO: 9424 - protein, 25 aa, Artificial Sequence
  Cyclic GFR-binding peptide
  MOD_RES (6)..(7): Xaa is C or S
SIPKAXXVPTELSPISMLYIDEYDK

SEQ ID NO: 9425 - protein, 26 aa, Artificial Sequence
  Cyclic GFR-binding peptide
  MOD_RES (6)..(7): Xaa is C or S
ASASPXXVPQDLEPISILYLVGRTPK

SEQ ID NO: 9426 - protein, 16 aa, Artificial Sequence
  Cyclic GFR-binding peptide
  MOD_RES (2)..(3): Xaa is C or S
SXXVPARLNAISILYF

SEQ ID NO: 9427 - protein, 25 aa, Artificial Sequence
  Cyclic GFR-binding peptide
  MOD_RES (6)..(7): Xaa is C or S
KIPKAXXVPTELEPISMLYLDENEK

SEQ ID NO: 9428 - protein, 22 aa, Artificial Sequence
  Cyclic GFR-binding peptide
  MOD_RES (6)..(7): Xaa is C or S
SIPKAXXVPTELEPISMLYLDE

SEQ ID NO: 9429 - protein, 19 aa, Artificial Sequence
  Cyclic GFR-binding peptide
  MOD_RES (5)..(6): Xaa is C or S
APASXXVPARLNAISILYF

SEQ ID NO: 9430 - protein, 17 aa, Artificial Sequence
  Cyclic GFR-binding peptide
  MOD_RES (4)..(4): Xaa is C or S
KPTXAPTKLEPISVLYL

SEQ ID NO: 9431 - protein, 18 aa, Artificial Sequence
  Cyclic GFR-binding peptide
TQLSPISVLYIDDSSNVI

SEQ ID NO: 9432 - protein, 18 aa, Artificial Sequence
  Cyclic GFR-binding peptide
TKLSPISVLYIDDSSNVI

SEQ ID NO: 9433 - protein, 17 aa, Artificial Sequence
  Cyclic GFR-binding peptide
ALEPISILYLVGRKPKV

SEQ ID NO: 9434 - protein, 16 aa, Artificial Sequence
  Cyclic GFR-binding peptide
  MOD_RES (2)..(3): Xaa is C or S
SXXVPARLSPISILYK

SEQ ID NO: 9435 - protein, 17 aa, Artificial Sequence
  Cyclic GFR-binding peptide
  MOD_RES (3)..(4): Xaa is C or S
KAXXAPTKLEPISVLYL

SEQ ID NO: 9436 - protein, 23 aa, Artificial Sequence
  Cyclic GFR-binding peptide
  MOD_RES (6)..(7): Xaa is C or S
KVGKAXXVPTKLSPISVLYIDDM

SEQ ID NO: 9437 - protein, 24 aa, Artificial Sequence
  Cyclic GFR-binding peptide
  MOD_RES (6)..(7): Xaa is C or S
AAPASXXVPARLNAISILYFDAAN

SEQ ID NO: 9438 - protein, 15 aa, Artificial Sequence
  Cyclic GFR-binding peptide
EPISVLYLDDSSNVI

SEQ ID NO: 9439 - protein, 15 aa, Artificial Sequence
  Cyclic GFR-binding peptide
  MOD_RES (1)..(2): Xaa is C or S
XXVPTELEPISMLYL

SEQ ID NO: 9440 - protein, 17 aa, Artificial Sequence
  Cyclic GFR-binding peptide
DLEPISILYLVGRTPKV

SEQ ID NO: 9441 - protein, 19 aa, Artificial Sequence
  Cyclic GFR-binding peptide
PARLNAISILYFDAANNVV

SEQ ID NO: 9442 - protein, 24 aa, Artificial Sequence
  Cyclic GFR-binding peptide
  MOD_RES (6)..(7): Xaa is C or S
KVGKAXXVPTKLEPISVLYLDDMG

SEQ ID NO: 9443 - protein, 25 aa, Artificial Sequence
  Cyclic GFR-binding peptide
  MOD_RES (6)..(7): Xaa is C or S
ASAAPXXVPQALEPISILYLVGRKP

SEQ ID NO: 9444 - protein, 15 aa, Artificial Sequence
  Cyclic GFR-binding peptide
  MOD_RES (1)..(2): Xaa is C or S
XXVPQDLEPISILYL

SEQ ID NO: 9445 - protein, 18 aa, Artificial Sequence
  Cyclic GFR-binding peptide
QALSPISILYIVGRKPKV

SEQ ID NO: 9446 - protein, 14 aa, Artificial Sequence
  Cyclic GFR-binding peptide
  MOD_RES (1)..(1): Xaa is C or S
XAPTQLEPISVLYL

SEQ ID NO: 9447 - protein, 17 aa, Artificial Sequence
  Cyclic GFR-binding peptide
DLSPISILYIIGKTPKI

SEQ ID NO: 9448 - protein, 26 aa, Artificial Sequence
  Cyclic GFR-binding peptide
  MOD_RES (6)..(7): Xaa is C or S
ASASPXXVSQDLEPISILYLIGKTPK

SEQ ID NO: 9449 - protein, 17 aa, Artificial Sequence
  Cyclic GFR-binding peptide
RLNAISILYFDAANNVV

SEQ ID NO: 9450 - protein, 21 aa, Artificial Sequence
  Cyclic GFR-binding peptide
  MOD_RES (6)..(7): Xaa is C or S
KIPKAXXVPTELSPISMLYID

SEQ ID NO: 9451 - protein, 22 aa, Artificial Sequence
  Cyclic GFR-binding peptide
  MOD_RES (6)..(7): Xaa is C or S
KVGKAXXVPTKLSPISVLYIDD

SEQ ID NO: 9452 - protein, 19 aa, Artificial Sequence
  Cyclic GFR-binding peptide
  MOD_RES (5)..(6): Xaa is C or S
SAAPXXVPQALEPISILYL

SEQ ID NO: 9453 - protein, 27 aa, Artificial Sequence
  Cyclic GFR-binding peptide
  MOD_RES (6)..(7): Xaa is C or S
ASASPXXVSQDLSPISILYIIGKTPKI

SEQ ID NO: 9454 - protein, 17 aa, Artificial Sequence
  Cyclic GFR-binding peptide
KLEPISVLYLDSSNNVI

SEQ ID NO: 9455 - protein, 27 aa, Artificial Sequence
  Cyclic GFR-binding peptide
  MOD_RES (7)..(7): Xaa is C or S
HVTKPTXAPTKLSPISVLYIDDSSNVI

SEQ ID NO: 9456 - protein, 24 aa, Artificial Sequence
  Cyclic GFR-binding peptide
  MOD_RES (7)..(7): Xaa is C or S
HVTKPTXAPTKLSPISVLYIDDSS

SEQ ID NO: 9457 - protein, 23 aa, Artificial Sequence
  Cyclic GFR-binding peptide
  MOD_RES (6)..(7): Xaa is C or S
KIPKAXXVPTELSPISMLYIDEN

SEQ ID NO: 9458 - protein, 27 aa, Artificial Sequence
  Cyclic GFR-binding peptide
  MOD_RES (6)..(7): Xaa is C or S
KIPKAXXVPTELEPISMLYLDENEKVV

SEQ ID NO: 9459 - protein, 16 aa, Artificial Sequence
  Cyclic GFR-binding peptide
LEPISVLYLDSSNNVI

SEQ ID NO: 9460 - protein, 19 aa, Artificial Sequence
  Cyclic GFR-binding peptide
PTKLNAISILYFDKGVVTY

SEQ ID NO: 9461 - protein, 16 aa, Artificial Sequence
  Cyclic GFR-binding peptide
  MOD_RES (2)..(3): Xaa is C or S
PXXAPTKLEPISVLYL

SEQ ID NO: 9462 - protein, 21 aa, Artificial Sequence
  Cyclic GFR-binding peptide
  MOD_RES (7)..(7): Xaa is C or S
HVTKPTXAPTKLSPISVLYID

SEQ ID NO: 9463 - protein, 17 aa, Artificial Sequence
  Cyclic GFR-binding peptide
  MOD_RES (3)..(4): Xaa is C or S
KAXXVPTELSPISMLYI

SEQ ID NO: 9464 - protein, 15 aa, Artificial Sequence
  Cyclic GFR-binding peptide
SPISVLYIDSSNNVI

SEQ ID NO: 9465 - protein, 19 aa, Artificial Sequence
  Cyclic GFR-binding peptide
PTELSPISMLYIDEYDKVV

SEQ ID NO: 9466 - protein, 27 aa, Artificial Sequence
  Cyclic GFR-binding peptide
  MOD_RES (6)..(7): Xaa is C or S
AAPASXXVPARLEPISILYLDAANNVV

SEQ ID NO: 9467 - protein, 19 aa, Artificial Sequence
  Cyclic GFR-binding peptide
PARLEPISILYLDAANNVV

SEQ ID NO: 9468 - protein, 24 aa, Artificial Sequence
  Cyclic GFR-binding peptide
  MOD_RES (6)..(7): Xaa is C or S
ASASPXXVPQDLEPISILYLVGRT

SEQ ID NO: 9469 - protein, 19 aa, Artificial Sequence
  Cyclic GFR-binding peptide
PQALEPISILYLVGRKPKV

SEQ ID NO: 9470 - protein, 19 aa, Artificial Sequence
  Cyclic GFR-binding peptide
  MOD_RES (5)..(6): Xaa is C or S
SASPXXVPQDLEPISILYL

SEQ ID NO: 9471 - protein, 20 aa, Artificial Sequence
  Cyclic GFR-binding peptide
  MOD_RES (6)..(7): Xaa is C or S
KVGKAXXVPTKLEPISVLYL

SEQ ID NO: 9472 - protein, 20 aa, Artificial Sequence
  Cyclic GFR-binding peptide
  MOD_RES (6)..(7): Xaa is C or S
TVPKPXXAPTQLSPISVLYI

SEQ ID NO: 9473 - protein, 17 aa, Artificial Sequence
  Cyclic GFR-binding peptide
  MOD_RES (3)..(4): Xaa is C or S
APXXVPQALEPISILYL

SEQ ID NO: 9474 - protein, 14 aa, Artificial Sequence
  Cyclic GFR-binding peptide
  MOD_RES (1)..(1): Xaa is C or S
XVPTKLSPISVLYI

SEQ ID NO: 9475 - protein, 24 aa, Artificial Sequence
  Cyclic GFR-binding peptide
  MOD_RES (6)..(7): Xaa is C or S
AAPASXXVPARLSPISILYKDAAN

SEQ ID NO: 9476 - protein, 23 aa, Artificial Sequence
  Cyclic GFR-binding peptide
  MOD_RES (6)..(7): Xaa is C or S
KASKAXXVPTKLSPISILYKDKG

SEQ ID NO: 9477 - protein, 24 aa, Artificial Sequence
  Cyclic GFR-binding peptide
  MOD_RES (6)..(7): Xaa is C or S
AAPASXXVPARLEPISILYLDAAN

SEQ ID NO: 9478 - protein, 21 aa, Artificial Sequence
  Cyclic GFR-binding peptide
  MOD_RES (6)..(7): Xaa is C or S
KASKAXXVPTKLNAISILYFD

SEQ ID NO: 9479 - protein, 27 aa, Artificial Sequence
  Cyclic GFR-binding peptide
  MOD_RES (7)..(7): Xaa is C or S
HVTKPTXAPTKLEPISVLYLDDSSNVI

SEQ ID NO: 9480 - protein, 20 aa, Artificial Sequence
  Cyclic GFR-binding peptide
  MOD_RES (6)..(7): Xaa is C or S
AVPKAXXAPTKLSPISVLYI

SEQ ID NO: 9481 - protein, 17 aa, Artificial Sequence
  Cyclic GFR-binding peptide
KLEPISVLYLDDSSNVI

SEQ ID NO: 9482 - protein, 17 aa, Artificial Sequence
  Cyclic GFR-binding peptide
QLEPISVLYLDDSSNVI

SEQ ID NO: 9483 - protein, 20 aa, Artificial Sequence
  Cyclic GFR-binding peptide
  MOD_RES (6)..(7): Xaa is C or S
TVPKPXXAPTQLEPISVLYL

SEQ ID NO: 9484 - protein, 19 aa, Artificial Sequence
  Cyclic GFR-binding peptide
  MOD_RES (5)..(6): Xaa is C or S
VPKPXXAPTQLEPISVLYL

SEQ ID NO: 9485 - protein, 23 aa, Artificial Sequence
  Cyclic GFR-binding peptide
  MOD_RES (7)..(7): Xaa is C or S
HVTKPTXAPTKLSPISVLYIDDS

SEQ ID NO: 9486 - protein, 19 aa, Artificial Sequence
  Cyclic GFR-binding peptide
  MOD_RES (5)..(6): Xaa is C or S
SASPXXVSQDLSPISILYI

SEQ ID NO: 9487 - protein, 16 aa, Artificial Sequence
  Cyclic GFR-binding peptide
LSPISVLYIDSSNNVI

SEQ ID NO: 9488 - protein, 22 aa, Artificial Sequence
  Cyclic GFR-binding peptide
  MOD_RES (7)..(7): Xaa is C or S
HVTKPTXAPTKLSPISVLYIDD

SEQ ID NO: 9489 - protein, 15 aa, Artificial Sequence
  Cyclic GFR-binding peptide
EPISVLYLDSSNNVI

SEQ ID NO: 9490 - protein, 23 aa, Artificial Sequence
  Cyclic GFR-binding peptide
  MOD_RES (6)..(7): Xaa is C or S
YVPKPXXAPTKLEPISVLYLDDS

SEQ ID NO: 9491 - protein, 22 aa, Artificial Sequence
  Cyclic GFR-binding peptide
  MOD_RES (6)..(7): Xaa is C or S
KIPKAXXVPTELEPISMLYLDE

SEQ ID NO: 9492 - protein, 17 aa, Artificial Sequence
  Cyclic GFR-binding peptide
KLSPISVLYIDSSNNVI

SEQ ID NO: 9493 - protein, 13 aa, Artificial Sequence
  Cyclic GFR-binding peptide
VPTKLNAISILYF

SEQ ID NO: 9494 - protein, 25 aa, Artificial Sequence
  Cyclic GFR-binding peptide
  MOD_RES (6)..(7): Xaa is C or S
YVPKPXXAPTKLEPISVLYLDDSSN

SEQ ID NO: 9495 - protein, 15 aa, Artificial Sequence
  Cyclic GFR-binding peptide
  MOD_RES (1)..(2): Xaa is C or S
XXVPTKLNAISILYF

SEQ ID NO: 9496 - protein, 16 aa, Artificial Sequence
  Cyclic GFR-binding peptide
LEPISILYLDAANNVV

SEQ ID NO: 9497 - protein, 18 aa, Artificial Sequence
  Cyclic GFR-binding peptide
TKLSPISILYKDKGVVTY

SEQ ID NO: 9498 - protein, 27 aa, Artificial Sequence
  Cyclic GFR-binding peptide
  MOD_RES (6)..(7): Xaa is C or S
ASAAPXXVPQALEPISILYLVGRKPKV

SEQ ID NO: 9499 - protein, 15 aa, Artificial Sequence
  Cyclic GFR-binding peptide
NAISILYFDKGVVTY

SEQ ID NO: 9500 - protein, 25 aa, Artificial Sequence
  Cyclic GFR-binding peptide
  MOD_RES (6)..(7): Xaa is C or S
ASASPXXVPQDLEPISILYLVGRTP

SEQ ID NO: 9501 - protein, 22 aa, Artificial Sequence
  Cyclic GFR-binding peptide
  MOD_RES (6)..(7): Xaa is C or S
SIPKAXXVPTELSPISMLYIDE

SEQ ID NO: 9502 - protein, 22 aa, Artificial Sequence
  Cyclic GFR-binding peptide
  MOD_RES (6)..(7): Xaa is C or S
ASAAPXXVPQALEPISILYLVG

SEQ ID NO: 9503 - protein, 20 aa, Artificial Sequence
  Cyclic GFR-binding peptide
  MOD_RES (6)..(7): Xaa is C or S
ASASPXXVPQDLSPISILYI

SEQ ID NO: 9504 - protein, 25 aa, Artificial Sequence
  Cyclic GFR-binding peptide
  MOD_RES (6)..(7): Xaa is C or S
KVGKAXXVPTKLSPISVLYIDDMGV

SEQ ID NO: 9505 - protein, 17 aa, Artificial Sequence
  Cyclic GFR-binding peptide
  MOD_RES (3)..(4): Xaa is C or S
KAXXVPTKLEPISVLYL

SEQ ID NO: 9506 - protein, 25 aa, Artificial Sequence
  Cyclic GFR-binding peptide
  MOD_RES (6)..(7): Xaa is C or S
ASASPXXVPQDLSPISILYIVGRTP

SEQ ID NO: 9507 - protein, 26 aa, Artificial Sequence
  Cyclic GFR-binding peptide
  MOD_RES (6)..(7): Xaa is C or S
KASKAXXVPTKLSPISILYKDKGVVT

SEQ ID NO: 9508 - protein, 14 aa, Artificial Sequence
  Cyclic GFR-binding peptide
  MOD_RES (1)..(1): Xaa is C or S
XVPQALEPISILYL

SEQ ID NO: 9509 - protein, 27 aa, Artificial Sequence
  Cyclic GFR-binding peptide
  MOD_RES (6)..(7): Xaa is C or S
AAPASXXVPARLSPISILYKDAANNVV

SEQ ID NO: 9510 - protein, 18 aa, Artificial Sequence
  Cyclic GFR-binding peptide
  MOD_RES (5)..(5): Xaa is C or S
TKPTXAPTKLEPISVLYL

SEQ ID NO: 9511 - protein, 17 aa, Artificial Sequence
  Cyclic GFR-binding peptide
DLEPISILYLIGKTPKI

SEQ ID NO: 9512 - protein, 19 aa, Artificial Sequence
  Cyclic GFR-binding peptide
PTQLEPISVLYLDDSSNVI

SEQ ID NO: 9513 - protein, 17 aa, Artificial Sequence
  Cyclic GFR-binding peptide
  MOD_RES (3)..(4): Xaa is C or S
KPXXAPTQLEPISVLYL

SEQ ID NO: 9514 - protein, 24 aa, Artificial Sequence
  Cyclic GFR-binding peptide
  MOD_RES (6)..(7): Xaa is C or S
AVPKAXXAPTKLSPISVLYIDSSN

SEQ ID NO: 9515 - protein, 26 aa, Artificial Sequence
  Cyclic GFR-binding peptide
  MOD_RES (6)..(7): Xaa is C or S
YVPKPXXAPTKLSPISVLYIDDSSNV

SEQ ID NO: 9516 - protein, 16 aa, Artificial Sequence
  Cyclic GFR-binding peptide
LEPISVLYLDDSSNVI

SEQ ID NO: 9517 - protein, 27 aa, Artificial Sequence
  Cyclic GFR-binding peptide
  MOD_RES (6)..(7): Xaa is C or S
SIPKAXXVPTELEPISMLYLDEYDKVV

SEQ ID NO: 9518 - protein, 18 aa, Artificial Sequence
  Cyclic GFR-binding peptide
QDLSPISILYIVGRTPKV

SEQ ID NO: 9519 - protein, 19 aa, Artificial Sequence
  Cyclic GFR-binding peptide
PTKLSPISVLYIDSSNNVI

SEQ ID NO: 9520 - protein, 23 aa, Artificial Sequence
  Cyclic GFR-binding peptide
  MOD_RES (6)..(7): Xaa is C or S
AAPASXXVPARLEPISILYLDAA

SEQ ID NO: 9521 - protein, 16 aa, Artificial Sequence
  Cyclic GFR-binding peptide
  MOD_RES (2)..(3): Xaa is C or S
AXXVPTELEPISMLYL

SEQ ID NO: 9522 - protein, 24 aa, Artificial Sequence
  Cyclic GFR-binding peptide
  MOD_RES (6)..(7): Xaa is C or S
AVPKAXXAPTKLEPISVLYLDSSN

SEQ ID NO: 9523 - protein, 23 aa, Artificial Sequence
  Cyclic GFR-binding peptide
  MOD_RES (6)..(7): Xaa is C or S
ASASPXXVSQDLEPISILYLIGK

SEQ ID NO: 9524 - protein, 15 aa, Artificial Sequence
  Cyclic GFR-binding peptide
SPISMLYIDEYDKVV

SEQ ID NO: 9525 - protein, 22 aa, Artificial Sequence
  Cyclic GFR-binding peptide
  MOD_RES (6)..(7): Xaa is C or S
ASAAPXXVPQALSPISILYIVG

SEQ ID NO: 9526 - protein, 21 aa, Artificial Sequence
  Cyclic GFR-binding peptide
  MOD_RES (6)..(7): Xaa is C or S
KASKAXXVPTKLSPISILYID

SEQ ID NO: 9527 - protein, 13 aa, Artificial Sequence
  Cyclic GFR-binding peptide
APTQLEPISVLYL

SEQ ID NO: 9528 - protein, 14 aa, Artificial Sequence
  Cyclic GFR-binding peptide
  MOD_RES (1)..(1): Xaa is C or S
XVPQDLEPISILYL

SEQ ID NO: 9529 - protein, 19 aa, Artificial Sequence
  Cyclic GFR-binding peptide
  MOD_RES (5)..(6): Xaa is C or S
VPKAXXAPTKLEPISVLYL

SEQ ID NO: 9530 - protein, 15 aa, Artificial Sequence
  Cyclic GFR-binding peptide
  MOD_RES (1)..(2): Xaa is C or S
XXAPTQLEPISVLYL

SEQ ID NO: 9531 - protein, 21 aa, Artificial Sequence
  Cyclic GFR-binding peptide
  MOD_RES (6)..(7): Xaa is C or S
ASAAPXXVPQALSPISILYIV

SEQ ID NO: 9532 - protein, 26 aa, Artificial Sequence
  Cyclic GFR-binding peptide
  MOD_RES (6)..(7): Xaa is C or S
AVPKAXXAPTKLEPISVLYLDSSNNV

SEQ ID NO: 9533 - protein, 20 aa, Artificial Sequence
  Cyclic GFR-binding peptide
  MOD_RES (6)..(7): Xaa is C or S
KASKAXXVPTKLSPISILYK

SEQ ID NO: 9534 - protein, 20 aa, Artificial Sequence
  Cyclic GFR-binding peptide
  MOD_RES (6)..(7): Xaa is C or S
KASKAXXVPTKLSPISILYI

SEQ ID NO: 9535 - protein, 13 aa, Artificial Sequence
  Cyclic GFR-binding peptide
VPARLEPISILYL

SEQ ID NO: 9536 - protein, 15 aa, Artificial Sequence
  Cyclic GFR-binding peptide
  MOD_RES (1)..(2): Xaa is C or S
XXAPTKLSPISVLYI

SEQ ID NO: 9537 - protein, 19 aa, Artificial Sequence
  Cyclic GFR-binding peptide
  MOD_RES (5)..(6): Xaa is C or S
APASXXVPARLEPISILYL

SEQ ID NO: 9538 - protein, 16 aa, Artificial Sequence
  Cyclic GFR-binding peptide
  MOD_RES (2)..(3): Xaa is C or S
PXXAPTKLSPISVLYI

SEQ ID NO: 9539 - protein, 22 aa, Artificial Sequence
  Cyclic GFR-binding peptide
  MOD_RES (6)..(7): Xaa is C or S
YVPKPXXAPTKLEPISVLYLDD

SEQ ID NO: 9540 - protein, 19 aa, Artificial Sequence
  Cyclic GFR-binding peptide
  MOD_RES (5)..(6): Xaa is C or S
SAAPXXVPQALSPISILYI

SEQ ID NO: 9541 - protein, 18 aa, Artificial Sequence
  Cyclic GFR-binding peptide
  MOD_RES (4)..(5): Xaa is C or S
PKAXXVPTELEPISMLYL

SEQ ID NO: 9542 - protein, 17 aa, Artificial Sequence
  Cyclic GFR-binding peptide
DLSPISILYIVGRTPKV

SEQ ID NO: 9543 - protein, 21 aa, Artificial Sequence
  Cyclic GFR-binding peptide
  MOD_RES (6)..(7): Xaa is C or S
AAPASXXVPARLSPISILYKD

SEQ ID NO: 9544 - protein, 13 aa, Artificial Sequence
  Cyclic GFR-binding peptide
VPQDLSPISILYI

SEQ ID NO: 9545 - protein, 14 aa, Artificial Sequence
  Cyclic GFR-binding peptide
  MOD_RES (1)..(1): Xaa is C or S
XAPTQLSPISVLYI

SEQ ID NO: 9546 - protein, 15 aa, Artificial Sequence
  Cyclic GFR-binding peptide
  MOD_RES (1)..(2): Xaa is C or S
XXVPTKLSPISVLYI

SEQ ID NO: 9547 - protein, 15 aa, Artificial Sequence
  Cyclic GFR-binding peptide
SPISVLYIDDMGVPT

SEQ ID NO: 9548 - protein, 22 aa, Artificial Sequence
  Cyclic GFR-binding peptide
  MOD_RES (6)..(7): Xaa is C or S
TVPKPXXAPTQLEPISVLYLDD

SEQ ID NO: 9549 - protein, 18 aa, Artificial Sequence
  Cyclic GFR-binding peptide
QALEPISILYLVGRKPKV

SEQ ID NO: 9550 - protein, 16 aa, Artificial Sequence
  Cyclic GFR-binding peptide
LEPISILYLIGKTPKI

SEQ ID NO: 9551 - protein, 18 aa, Artificial Sequence
  Cyclic GFR-binding peptide
  MOD_RES (4)..(5): Xaa is C or S
PKPXXAPTKLEPISVLYL

SEQ ID NO: 9552 - protein, 20 aa, Artificial Sequence
  Cyclic GFR-binding peptide
  MOD_RES (6)..(7): Xaa is C or S
SIPKAXXVPTELSPISMLYI

SEQ ID NO: 9553 - protein, 23 aa, Artificial Sequence
  Cyclic GFR-binding peptide
  MOD_RES (6)..(7): Xaa is C or S
SIPKAXXVPTELEPISMLYLDEY

SEQ ID NO: 9554 - protein, 24 aa, Artificial Sequence
  Cyclic GFR-binding peptide
  MOD_RES (6)..(7): Xaa is C or S
ASAAPXXVPQALEPISILYLVGRK

SEQ ID NO: 9555 - protein, 18 aa, Artificial Sequence
  Cyclic GFR-binding peptide
  MOD_RES (4)..(5): Xaa is C or S
GKAXXVPTKLEPISVLYL

SEQ ID NO: 9556 - protein, 19 aa, Artificial Sequence
  Cyclic GFR-binding peptide
  MOD_RES (5)..(6): Xaa is C or S
SASPXXVPQDLSPISILYI

SEQ ID NO: 9557 - protein, 20 aa, Artificial Sequence
  Cyclic GFR-binding peptide
  MOD_RES (6)..(7): Xaa is C or S
KASKAXXVPTKLNAISILYF

SEQ ID NO: 9558 - protein, 22 aa, Artificial Sequence
  Cyclic GFR-binding peptide
  MOD_RES (6)..(7): Xaa is C or S
YVPKPXXAPTKLSPISVLYIDD

SEQ ID NO: 9559 - protein, 20 aa, Artificial Sequence
  Cyclic GFR-binding peptide
  MOD_RES (6)..(7): Xaa is C or S
YVPKPXXAPTKLSPISVLYI

SEQ ID NO: 9560 - protein, 16 aa, Artificial Sequence
  Cyclic GFR-binding peptide
  MOD_RES (2)..(3): Xaa is C or S
AXXVPTKLNAISILYF

SEQ ID NO: 9561 - protein, 16 aa, Artificial Sequence
  Cyclic GFR-binding peptide
LSPISMLYIDENEKVV

SEQ ID NO: 9562 - protein, 15 aa, Artificial Sequence
  Cyclic GFR-binding peptide
EPISMLYLDEYDKVV

SEQ ID NO: 9563 - protein, 25 aa, Artificial Sequence
  Cyclic GFR-binding peptide
  MOD_RES (6)..(7): Xaa is C or S
ASASPXXVSQDLSPISILYIIGKTP

SEQ ID NO: 9564 - protein, 17 aa, Artificial Sequence
  Cyclic GFR-binding peptide
  MOD_RES (3)..(4): Xaa is C or S
ASXXVPARLNAISILYF

SEQ ID NO: 9565 - protein, 23 aa, Artificial Sequence
  Cyclic GFR-binding peptide
  MOD_RES (6)..(7): Xaa is C or S
AVPKAXXAPTKLSPISVLYIDSS

SEQ ID NO: 9566 - protein, 24 aa, Artificial Sequence
  Cyclic GFR-binding peptide
  MOD_RES (6)..(7): Xaa is C or S
ASASPXXVPQDLSPISILYIVGRT

SEQ ID NO: 9567 - protein, 19 aa, Artificial Sequence
  Cyclic GFR-binding peptide
  MOD_RES (5)..(6): Xaa is C or S
VPKPXXAPTQLSPISVLYI

SEQ ID NO: 9568 - protein, 19 aa, Artificial Sequence
  Cyclic GFR-binding peptide
  MOD_RES (5)..(6): Xaa is C or S
ASKAXXVPTKLNAISILYF

SEQ ID NO: 9569 - protein, 22 aa, Artificial Sequence
  Cyclic GFR-binding peptide
  MOD_RES (6)..(7): Xaa is C or S
TVPKPXXAPTQLSPISVLYIDD

SEQ ID NO: 9570 - protein, 25 aa, Artificial Sequence
  Cyclic GFR-binding peptide
  MOD_RES (6)..(7): Xaa is C or S
AVPKAXXAPTKLEPISVLYLDSSNN

SEQ ID NO: 9571 - protein, 24 aa, Artificial Sequence
  Cyclic GFR-binding peptide
  MOD_RES (6)..(7): Xaa is C or S
KVGKAXXVPTKLSPISVLYIDDMG

SEQ ID NO: 9572 - protein, 19 aa, Artificial Sequence
  Cyclic GFR-binding peptide
  MOD_RES (5)..(6): Xaa is C or S
VPKPXXAPTKLSPISVLYI

SEQ ID NO: 9573 - protein, 17 aa, Artificial Sequence
  Cyclic GFR-binding peptide
  MOD_RES (3)..(4): Xaa is C or S
KAXXVPTKLSPISVLYI

SEQ ID NO: 9574 - protein, 16 aa, Artificial Sequence
  Cyclic GFR-binding peptide
  MOD_RES (3)..(3): Xaa is C or S
PTXAPTKLSPISVLYI

SEQ ID NO: 9575 - protein, 19 aa, Artificial Sequence
  Cyclic GFR-binding peptide
PTKLSPISVLYIDDSSNVI

SEQ ID NO: 9576 - protein, 25 aa, Artificial Sequence
  Cyclic GFR-binding peptide
  MOD_RES (6)..(7): Xaa is C or S
AAPASXXVPARLEPISILYLDAANN

SEQ ID NO: 9577 - protein, 27 aa, Artificial Sequence
  Cyclic GFR-binding peptide
  MOD_RES (6)..(7): Xaa is C or S
KVGKAXXVPTKLEPISVLYLDDMGVPT

SEQ ID NO: 9578 - protein, 27 aa, Artificial Sequence
  Cyclic GFR-binding peptide
  MOD_RES (6)..(7): Xaa is C or S
AAPASXXVPARLNAISILYFDAANNVV

SEQ ID NO: 9579 - protein, 19 aa, Artificial Sequence
  Cyclic GFR-binding peptide
PTQLSPISVLYIDDSSNVI

SEQ ID NO: 9580 - protein, 25 aa, Artificial Sequence
  Cyclic GFR-binding peptide
  MOD_RES (7)..(7): Xaa is C or S
HVTKPTXAPTKLSPISVLYIDDSSN

SEQ ID NO: 9581 - protein, 15 aa, Artificial Sequence
  Cyclic GFR-binding peptide
  MOD_RES (1)..(2): Xaa is C or S
XXVPQALEPISILYL

SEQ ID NO: 9582 - protein, 13 aa, Artificial Sequence
  Cyclic GFR-binding peptide
VSQDLSPISILYI

SEQ ID NO: 9583 - protein, 24 aa, Artificial Sequence
  Cyclic GFR-binding peptide
  MOD_RES (7)..(7): Xaa is C or S
HVTKPTXAPTKLEPISVLYLDDSS

SEQ ID NO: 9584 - protein, 20 aa, Artificial Sequence
  Cyclic GFR-binding peptide
  MOD_RES (6)..(7): Xaa is C or S
ASASPXXVSQDLSPISILYI

SEQ ID NO: 9585 - protein, 17 aa, Artificial Sequence
  Cyclic GFR-binding peptide
KLSPISVLYIDDMGVPT

SEQ ID NO: 9586 - protein, 21 aa, Artificial Sequence
  Cyclic GFR-binding peptide
  MOD_RES (6)..(7): Xaa is C or S
TVPKPXXAPTQLSPISVLYID

SEQ ID NO: 9587 - protein, 16 aa, Artificial Sequence
  Cyclic GFR-binding peptide
LSPISMLYIDEYDKVV

SEQ ID NO: 9588 - protein, 21 aa, Artificial Sequence
  Cyclic GFR-binding peptide
  MOD_RES (6)..(7): Xaa is C or S
SIPKAXXVPTELSPISMLYID

SEQ ID NO: 9589 - protein, 16 aa, Artificial Sequence
  Cyclic GFR-binding peptide
  MOD_RES (2)..(3): Xaa is C or S
PXXAPTQLSPISVLYI

SEQ ID NO: 9590 - protein, 18 aa, Artificial Sequence
  Cyclic GFR-binding peptide
QDLSPISILYIIGKTPKI

SEQ ID NO: 9591 - protein, 18 aa, Artificial Sequence
  Cyclic GFR-binding peptide
  MOD_RES (4)..(5): Xaa is C or S
AAPXXVPQALEPISILYL

SEQ ID NO: 9592 - protein, 15 aa, Artificial Sequence
  Cyclic GFR-binding peptide
  MOD_RES (1)..(2): Xaa is C or S
XXVPTKLSPISILYI

SEQ ID NO: 9593 - protein, 15 aa, Artificial Sequence
  Cyclic GFR-binding peptide
  MOD_RES (1)..(2): Xaa is C or S
XXVPTKLSPISILYK

SEQ ID NO: 9594 - protein, 21 aa, Artificial Sequence
  Cyclic GFR-binding peptide
  MOD_RES (6)..(7): Xaa is C or S
AAPASXXVPARLNAISILYFD

SEQ ID NO: 9595 - protein, 24 aa, Artificial Sequence
  Cyclic GFR-binding peptide
  MOD_RES (6)..(7): Xaa is C or S
SIPKAXXVPTELSPISMLYIDEYD

SEQ ID NO: 9596 - protein, 17 aa, Artificial Sequence
  Cyclic GFR-binding peptide
  MOD_RES (3)..(4): Xaa is C or S
SPXXVPQDLEPISILYL

SEQ ID NO: 9597 - protein, 22 aa, Artificial Sequence
  Cyclic GFR-binding peptide
  MOD_RES (7)..(7): Xaa is C or S
HVTKPTXAPTKLEPISVLYLDD

SEQ ID NO: 9598 - protein, 16 aa, Artificial Sequence
  Cyclic GFR-binding peptide
LEPISILYLVGRKPKV

SEQ ID NO: 9599 - protein, 25 aa, Artificial Sequence
  Cyclic GFR-binding peptide
  MOD_RES (6)..(7): Xaa is C or S
AVPKAXXAPTKLSPISVLYIDSSNN

SEQ ID NO: 9600 - protein, 19 aa, Artificial Sequence
  Cyclic GFR-binding peptide
PQDLSPISILYIVGRTPKV

SEQ ID NO: 9601 - protein, 27 aa, Artificial Sequence
  Cyclic GFR-binding peptide
  MOD_RES (6)..(7): Xaa is C or S
TVPKPXXAPTQLEPISVLYLDDSSNVI

SEQ ID NO: 9602 - protein, 25 aa, Artificial Sequence
  Cyclic GFR-binding peptide
  MOD_RES (6)..(7): Xaa is C or S
KASKAXXVPTKLSPISILYKDKGVV

SEQ ID NO: 9603 - protein, 23 aa, Artificial Sequence
  Cyclic GFR-binding peptide
  MOD_RES (6)..(7): Xaa is C or S
ASAAPXXVPQALSPISILYIVGR

SEQ ID NO: 9604 - protein, 14 aa, Artificial Sequence
  Cyclic GFR-binding peptide
  MOD_RES (1)..(1): Xaa is C or S
XVPTELEPISMLYL

SEQ ID NO: 9605 - protein, 18 aa, Artificial Sequence
  Cyclic GFR-binding peptide
ARLSPISILYKDAANNVV

SEQ ID NO: 9606 - protein, 17 aa, Artificial Sequence
  Cyclic GFR-binding peptide
ELEPISMLYLDEYDKVV

SEQ ID NO: 9607 - protein, 16 aa, Artificial Sequence
  Cyclic GFR-binding peptide
  MOD_RES (2)..(3): Xaa is C or S
PXXVSQDLEPISILYL

SEQ ID NO: 9608 - protein, 14 aa, Artificial Sequence
  Cyclic GFR-binding peptide
  MOD_RES (1)..(1): Xaa is C or S
XAPTKLSPISVLYI

SEQ ID NO: 9609 - protein, 16 aa, Artificial Sequence
  Cyclic GFR-binding peptide
  MOD_RES (2)..(3): Xaa is C or S
PXXVPQALEPISILYL

SEQ ID NO: 9610 - protein, 20 aa, Artificial Sequence
  Cyclic GFR-binding peptide
  MOD_RES (6)..(7): Xaa is C or S
ASASPXXVPQDLEPISILYL

SEQ ID NO: 9611 - protein, 22 aa, Artificial Sequence
  Cyclic GFR-binding peptide
  MOD_RES (6)..(7): Xaa is C or S
KASKAXXVPTKLSPISILYKDK

SEQ ID NO: 9612 - protein, 14 aa, Artificial Sequence
  Cyclic GFR-binding peptide
  MOD_RES (1)..(1): Xaa is C or S
XVPTKLEPISVLYL

SEQ ID NO: 9613 - protein, 19 aa, Artificial Sequence
  Cyclic GFR-binding peptide
PTELSPISMLYIDENEKVV

SEQ ID NO: 9614 - protein, 16 aa, Artificial Sequence
  Cyclic GFR-binding peptide
  MOD_RES (2)..(3): Xaa is C or S
AXXAPTKLEPISVLYL

SEQ ID NO: 9615 - protein, 17 aa, Artificial Sequence
  Cyclic GFR-binding peptide
  MOD_RES (3)..(4): Xaa is C or S
KAXXAPTKLSPISVLYI

SEQ ID NO: 9616 - protein, 24 aa, Artificial Sequence
  Cyclic GFR-binding peptide
  MOD_RES (6)..(7): Xaa is C or S
KIPKAXXVPTELSPISMLYIDENE

SEQ ID NO: 9617 - protein, 13 aa, Artificial Sequence
  Cyclic GFR-binding peptide
VPQALSPISILYI

SEQ ID NO: 9618 - protein, 15 aa, Artificial Sequence
  Cyclic GFR-binding peptide
  MOD_RES (1)..(2): Xaa is C or S
XXAPTQLSPISVLYI

SEQ ID NO: 9619 - protein, 17 aa, Artificial Sequence
  Cyclic GFR-binding peptide
RLEPISILYLDAANNVV

SEQ ID NO: 9620 - protein, 16 aa, Artificial Sequence
  Cyclic GFR-binding peptide
LNAISILYFDKGVVTY

SEQ ID NO: 9621 - protein, 27 aa, Artificial Sequence
  Cyclic GFR-binding peptide
  MOD_RES (6)..(7): Xaa is C or S
YVPKPXXAPTKLSPISVLYIDDSSNVI

SEQ ID NO: 9622 - protein, 21 aa, Artificial Sequence
  Cyclic GFR-binding peptide
  MOD_RES (6)..(7): Xaa is C or S
ASAAPXXVPQALEPISILYLV

SEQ ID NO: 9623 - protein, 15 aa, Artificial Sequence
  Cyclic GFR-binding peptide
  MOD_RES (1)..(2): Xaa is C or S
XXVSQDLEPISILYL

SEQ ID NO: 9624 - protein, 18 aa, Artificial Sequence
  Cyclic GFR-binding peptide
  MOD_RES (4)..(5): Xaa is C or S
PASXXVPARLEPISILYL

SEQ ID NO: 9625 - protein, 19 aa, Artificial Sequence
  Cyclic GFR-binding peptide
  MOD_RES (6)..(6): Xaa is C or S
VTKPTXAPTKLSPISVLYI

SEQ ID NO: 9626 - protein, 22 aa, Artificial Sequence
  Cyclic GFR-binding peptide
  MOD_RES (6)..(7): Xaa is C or S
KASKAXXVPTKLNAISILYFDK

SEQ ID NO: 9627 - protein, 18 aa, Artificial Sequence
  Cyclic GFR-binding peptide
  MOD_RES (4)..(5): Xaa is C or S
PKAXXAPTKLSPISVLYI

SEQ ID NO: 9628 - protein, 22 aa, Artificial Sequence
  Cyclic GFR-binding peptide
  MOD_RES (6)..(7): Xaa is C or S
ASASPXXVSQDLEPISILYLIG

SEQ ID NO: 9629 - protein, 18 aa, Artificial Sequence
  Cyclic GFR-binding peptide
ARLNAISILYFDAANNVV

SEQ ID NO: 9630 - protein, 20 aa, Artificial Sequence
  Cyclic GFR-binding peptide
  MOD_RES (6)..(7): Xaa is C or S
KIPKAXXVPTELSPISMLYI

SEQ ID NO: 9631 - protein, 18 aa, Artificial Sequence
  Cyclic GFR-binding peptide
  MOD_RES (4)..(5): Xaa is C or S
SKAXXVPTKLNAISILYF

SEQ ID NO: 9632 - protein, 27 aa, Artificial Sequence
  Cyclic GFR-binding peptide
  MOD_RES (6)..(7): Xaa is C or S
AVPKAXXAPTKLSPISVLYIDSSNNVI

SEQ ID NO: 9633 - protein, 18 aa, Artificial Sequence
  Cyclic GFR-binding peptide
TKLEPISVLYLDDMGVPT

SEQ ID NO: 9634 - protein, 15 aa, Artificial Sequence
  Cyclic GFR-binding peptide
EPISILYLDAANNVV

SEQ ID NO: 9635 - protein, 23 aa, Artificial Sequence
  Cyclic GFR-binding peptide
  MOD_RES (6)..(7): Xaa is C or S
KASKAXXVPTKLNAISILYFDKG

SEQ ID NO: 9636 - protein, 21 aa, Artificial Sequence
  Cyclic GFR-binding peptide
  MOD_RES (6)..(7): Xaa is C or S
KIPKAXXVPTELEPISMLYLD

SEQ ID NO: 9637 - protein, 19 aa, Artificial Sequence
  Cyclic GFR-binding peptide
PTKLSPISILYKDKGVVTY

SEQ ID NO: 9638 - protein, 19 aa, Artificial Sequence
  Cyclic GFR-binding peptide
  MOD_RES (5)..(6): Xaa is C or S
VGKAXXVPTKLSPISVLYI

SEQ ID NO: 9639 - protein, 27 aa, Artificial Sequence
  Cyclic GFR-binding peptide
  MOD_RES (6)..(7): Xaa is C or S
KIPKAXXVPTELSPISMLYIDENEKVV

SEQ ID NO: 9640 - protein, 25 aa, Artificial Sequence
  Cyclic GFR-binding peptide
  MOD_RES (7)..(7): Xaa is C or S
HVTKPTXAPTKLEPISVLYLDDSSN

SEQ ID NO: 9641 - protein, 19 aa, Artificial Sequence
  Cyclic GFR-binding peptide
  MOD_RES (5)..(6): Xaa is C or S
IPKAXXVPTELEPISMLYL

SEQ ID NO: 9642 - protein, 20 aa, Artificial Sequence
  Cyclic GFR-binding peptide
  MOD_RES (7)..(7): Xaa is C or S
HVTKPTXAPTKLSPISVLYI

SEQ ID NO: 9643 - protein, 23 aa, Artificial Sequence
  Cyclic GFR-binding peptide
  MOD_RES (6)..(7): Xaa is C or S
ASASPXXVSQDLSPISILYIIGK

SEQ ID NO: 9644 - protein, 22 aa, Artificial Sequence
  Cyclic GFR-binding peptide
  MOD_RES (6)..(7): Xaa is C or S
KASKAXXVPTKLSPISILYIDK

SEQ ID NO: 9645 - protein, 17 aa, Artificial Sequence
  Cyclic GFR-binding peptide
  MOD_RES (3)..(4): Xaa is C or S
KAXXVPTKLSPISILYK

SEQ ID NO: 9646 - protein, 17 aa, Artificial Sequence
  Cyclic GFR-binding peptide
  MOD_RES (3)..(4): Xaa is C or S
KAXXVPTKLSPISILYI

SEQ ID NO: 9647 - protein, 16 aa, Artificial Sequence
  Cyclic GFR-binding peptide
LSPISILYKDKGVVTY

SEQ ID NO: 9648 - protein, 22 aa, Artificial Sequence
  Cyclic GFR-binding peptide
  MOD_RES (6)..(7): Xaa is C or S
ASASPXXVSQDLSPISILYIIG

SEQ ID NO: 9649 - protein, 22 aa, Artificial Sequence
  Cyclic GFR-binding peptide
  MOD_RES (6)..(7): Xaa is C or S
AVPKAXXAPTKLSPISVLYIDS

SEQ ID NO: 9650 - protein, 21 aa, Artificial Sequence
  Cyclic GFR-binding peptide
  MOD_RES (6)..(7): Xaa is C or S
ASASPXXVSQDLSPISILYII

SEQ ID NO: 9651 - protein, 18 aa, Artificial Sequence
  Cyclic GFR-binding peptide
  MOD_RES (4)..(5): Xaa is C or S
ASPXXVSQDLSPISILYI

SEQ ID NO: 9652 - protein, 26 aa, Artificial Sequence
  Cyclic GFR-binding peptide
  MOD_RES (6)..(7): Xaa is C or S
AAPASXXVPARLNAISILYFDAANNV

SEQ ID NO: 9653 - protein, 15 aa, Artificial Sequence
  Cyclic GFR-binding peptide
  MOD_RES (1)..(2): Xaa is C or S
XXAPTKLEPISVLYL

SEQ ID NO: 9654 - protein, 21 aa, Artificial Sequence
  Cyclic GFR-binding peptide
  MOD_RES (6)..(7): Xaa is C or S
AAPASXXVPARLEPISILYLD

SEQ ID NO: 9655 - protein, 15 aa, Artificial Sequence
  Cyclic GFR-binding peptide
EPISMLYLDENEKVV

SEQ ID NO: 9656 - protein, 21 aa, Artificial Sequence
  Cyclic GFR-binding peptide
  MOD_RES (6)..(7): Xaa is C or S
KVGKAXXVPTKLSPISVLYID

SEQ ID NO: 9657 - protein, 19 aa, Artificial Sequence
  Cyclic GFR-binding peptide
  MOD_RES (5)..(6): Xaa is C or S
VPKPXXAPTKLEPISVLYL

SEQ ID NO: 9658 - protein, 26 aa, Artificial Sequence
  Cyclic GFR-binding peptide
  MOD_RES (6)..(7): Xaa is C or S
AAPASXXVPARLEPISILYLDAANNV

SEQ ID NO: 9659 - protein, 23 aa, Artificial Sequence
  Cyclic GFR-binding peptide
  MOD_RES (7)..(7): Xaa is C or S
HVTKPTXAPTKLEPISVLYLDDS

SEQ ID NO: 9660 - protein, 17 aa, Artificial Sequence
  Cyclic GFR-binding peptide
  MOD_RES (3)..(4): Xaa is C or S
ASXXVPARLEPISILYL

SEQ ID NO: 9661 - protein, 15 aa, Artificial Sequence
  Cyclic GFR-binding peptide
SPISILYIVGRTPKV

SEQ ID NO: 9662 - protein, 18 aa, Artificial Sequence
  Cyclic GFR-binding peptide
  MOD_RES (4)..(5): Xaa is C or S
PKAXXVPTELSPISMLYI

SEQ ID NO: 9663 - protein, 19 aa, Artificial Sequence
  Cyclic GFR-binding peptide
  MOD_RES (5)..(6): Xaa is C or S
VGKAXXVPTKLEPISVLYL

SEQ ID NO: 9664 - protein, 25 aa, Artificial Sequence
  Cyclic GFR-binding peptide
  MOD_RES (6)..(7): Xaa is C or S
ASAAPXXVPQALSPISILYIVGRKP

SEQ ID NO: 9665 - protein, 24 aa, Artificial Sequence
  Cyclic GFR-binding peptide
  MOD_RES (6)..(7): Xaa is C or S
SIPKAXXVPTELEPISMLYLDEYD

SEQ ID NO: 9666 - protein, 24 aa, Artificial Sequence
  Cyclic GFR-binding peptide
  MOD_RES (6)..(7): Xaa is C or S
KASKAXXVPTKLSPISILYIDKGV

SEQ ID NO: 9667 - protein, 24 aa, Artificial Sequence
  Cyclic GFR-binding peptide
  MOD_RES (6)..(7): Xaa is C or S
ASASPXXVSQDLEPISILYLIGKT

SEQ ID NO: 9668 - protein, 16 aa, Artificial Sequence
  Cyclic GFR-binding peptide
  MOD_RES (2)..(3): Xaa is C or S
PXXVPQDLEPISILYL

SEQ ID NO: 9669 - protein, 24 aa, Artificial Sequence
  Cyclic GFR-binding peptide
  MOD_RES (6)..(7): Xaa is C or S
TVPKPXXAPTQLSPISVLYIDDSS

SEQ ID NO: 9670 - protein, 16 aa, Artificial Sequence
  Cyclic GFR-binding peptide
LSPISILYIVGRKPKV

SEQ ID NO: 9671 - protein, 20 aa, Artificial Sequence
  Cyclic GFR-binding peptide
  MOD_RES (6)..(7): Xaa is C or S
ASASPXXVSQDLEPISILYL

SEQ ID NO: 9672 - protein, 16 aa, Artificial Sequence
  Cyclic GFR-binding peptide
LEPISILYLVGRTPKV

SEQ ID NO: 9673 - protein, 15 aa, Artificial Sequence
  Cyclic GFR-binding peptide
NAISILYFDAANNVV

SEQ ID NO: 9674 - protein, 26 aa, Artificial Sequence
  Cyclic GFR-binding peptide
  MOD_RES (6)..(7): Xaa is C or S
AVPKAXXAPTKLSPISVLYIDSSNNV

SEQ ID NO: 9675 - protein, 13 aa, Artificial Sequence
  Cyclic GFR-binding peptide
VPARLNAISILYF

SEQ ID NO: 9676 - protein, 20 aa, Artificial Sequence
  Cyclic GFR-binding peptide
  MOD_RES (6)..(7): Xaa is C or S
SIPKAXXVPTELEPISMLYL

SEQ ID NO: 9677 - protein, 20 aa, Artificial Sequence
  Cyclic GFR-binding peptide
  MOD_RES (6)..(7): Xaa is C or S
AAPASXXVPARLEPISILYL

SEQ ID NO: 9678 - protein, 20 aa, Artificial Sequence
  Cyclic GFR-binding peptide
  MOD_RES (7)..(7): Xaa is C or S
HVTKPTXAPTKLEPISVLYL

SEQ ID NO: 9679 - protein, 15 aa, Artificial Sequence
  Cyclic GFR-binding peptide
  MOD_RES (1)..(2): Xaa is C or S
XXVPARLSPISILYK

SEQ ID NO: 9680 - protein, 25 aa, Artificial Sequence
  Cyclic GFR-binding peptide
  MOD_RES (6)..(7): Xaa is C or S
KVGKAXXVPTKLEPISVLYLDDMGV

SEQ ID NO: 9681 - protein, 15 aa, Artificial Sequence
  Cyclic GFR-binding peptide
  MOD_RES (2)..(2): Xaa is C or S
TXAPTKLEPISVLYL

SEQ ID NO: 9682 - protein, 26 aa, Artificial Sequence
  Cyclic GFR-binding peptide
  MOD_RES (6)..(7): Xaa is C or S
KIPKAXXVPTELSPISMLYIDENEKV

SEQ ID NO: 9683 - protein, 23 aa, Artificial Sequence
  Cyclic GFR-binding peptide
  MOD_RES (6)..(7): Xaa is C or S
AAPASXXVPARLSPISILYKDAA

SEQ ID NO: 9684 - protein, 25 aa, Artificial Sequence
  Cyclic GFR-binding peptide
  MOD_RES (6)..(7): Xaa is C or S
YVPKPXXAPTKLSPISVLYIDDSSN

SEQ ID NO: 9685 - protein, 19 aa, Artificial Sequence
  Cyclic GFR-binding peptide
PTKLEPISVLYLDDMGVPT

SEQ ID NO: 9686 - protein, 22 aa, Artificial Sequence
  Cyclic GFR-binding peptide
  MOD_RES (6)..(7): Xaa is C or S
ASASPXXVPQDLSPISILYIVG

SEQ ID NO: 9687 - protein, 18 aa, Artificial Sequence
  Cyclic GFR-binding peptide
  MOD_RES (4)..(5): Xaa is C or S
PASXXVPARLNAISILYF

SEQ ID NO: 9688 - protein, 18 aa, Artificial Sequence
  Cyclic GFR-binding peptide
TELSPISMLYIDENEKVV

SEQ ID NO: 9689 - protein, 19 aa, Artificial Sequence
  Cyclic GFR-binding peptide
PTELEPISMLYLDENEKVV

SEQ ID NO: 9690 - protein, 15 aa, Artificial Sequence
  Cyclic GFR-binding peptide
SPISILYIDKGVVTY

SEQ ID NO: 9691 - protein, 13 aa, Artificial Sequence
  Cyclic GFR-binding peptide
VPTKLEPISVLYL

SEQ ID NO: 9692 - protein, 15 aa, Artificial Sequence
  Cyclic GFR-binding peptide
SPISILYKDAANNVV

SEQ ID NO: 9693 - protein, 13 aa, Artificial Sequence
  Cyclic GFR-binding peptide
VPARLSPISILYK

SEQ ID NO: 9694 - protein, 21 aa, Artificial Sequence
  Cyclic GFR-binding peptide
  MOD_RES (6)..(7): Xaa is C or S
AVPKAXXAPTKLEPISVLYLD

SEQ ID NO: 9695 - protein, 23 aa, Artificial Sequence
  Cyclic GFR-binding peptide
  MOD_RES (6)..(7): Xaa is C or S
KIPKAXXVPTELEPISMLYLDEN

SEQ ID NO: 9696 - protein, 15 aa, Artificial Sequence
  Cyclic GFR-binding peptide
  MOD_RES (1)..(2): Xaa is C or S
XXVPTKLEPISVLYL

SEQ ID NO: 9697 - protein, 25 aa, Artificial Sequence
  Cyclic GFR-binding peptide
  MOD_RES (6)..(7): Xaa is C or S
KASKAXXVPTKLNAISILYFDKGVV

SEQ ID NO: 9698 - protein, 17 aa, Artificial Sequence
  Cyclic GFR-binding peptide
  MOD_RES (3)..(4): Xaa is C or S
APXXVPQALSPISILYI

SEQ ID NO: 9699 - protein, 15 aa, Artificial Sequence
  Cyclic GFR-binding peptide
  MOD_RES (1)..(2): Xaa is C or S
XXVPARLNAISILYF

SEQ ID NO: 9700 - protein, 21 aa, Artificial Sequence
  Cyclic GFR-binding peptide
  MOD_RES (6)..(7): Xaa is C or S
YVPKPXXAPTKLEPISVLYLD

SEQ ID NO: 9701 - protein, 19 aa, Artificial Sequence
  Cyclic GFR-binding peptide
SQDLSPISILYIIGKTPKI

SEQ ID NO: 9702 - protein, 18 aa, Artificial Sequence
  Cyclic GFR-binding peptide
  MOD_RES (4)..(5): Xaa is C or S
GKAXXVPTKLSPISVLYI

SEQ ID NO: 9703 - protein, 18 aa, Artificial Sequence
  Cyclic GFR-binding peptide
TKLSPISVLYIDDMGVPT

SEQ ID NO: 9704 - protein, 26 aa, Artificial Sequence
  Cyclic GFR-binding peptide
  MOD_RES (6)..(7): Xaa is C or S
KVGKAXXVPTKLSPISVLYIDDMGVP

SEQ ID NO: 9705 - protein, 21 aa, Artificial Sequence
  Cyclic GFR-binding peptide
  MOD_RES (6)..(7): Xaa is C or S
ASASPXXVPQDLSPISILYIV

SEQ ID NO: 9706 - protein, 18 aa, Artificial Sequence
  Cyclic GFR-binding peptide
  MOD_RES (4)..(5): Xaa is C or S
ASPXXVPQDLSPISILYI

SEQ ID NO: 9707 - protein, 16 aa, Artificial Sequence
  Cyclic GFR-binding peptide
LSPISILYIVGRTPKV

SEQ ID NO: 9708 - protein, 17 aa, Artificial Sequence
  Cyclic GFR-binding peptide
  MOD_RES (3)..(4): Xaa is C or S
SPXXVPQDLSPISILYI

SEQ ID NO: 9709 - protein, 16 aa, Artificial Sequence
  Cyclic GFR-binding peptide
  MOD_RES (2)..(3): Xaa is C or S
PXXVPQALSPISILYI

SEQ ID NO: 9710 - protein, 16 aa, Artificial Sequence
  Cyclic GFR-binding peptide
  MOD_RES (2)..(3): Xaa is C or S
PXXAPTQLEPISVLYL

SEQ ID NO: 9711 - protein, 17 aa, Artificial Sequence
  Cyclic GFR-binding peptide
KLEPISVLYLDDMGVPT

SEQ ID NO: 9712 - protein, 24 aa, Artificial Sequence
  Cyclic GFR-binding peptide
  MOD_RES (6)..(7): Xaa is C or S
ASAAPXXVPQALSPISILYIVGRK

SEQ ID NO: 9713 - protein, 18 aa, Artificial Sequence
  Cyclic GFR-binding peptide
TELEPISMLYLDEYDKVV

SEQ ID NO: 9714 - protein, 18 aa, Artificial Sequence
  Cyclic GFR-binding peptide
TKLEPISVLYLDSSNNVI

SEQ ID NO: 9715 - protein, 27 aa, Artificial Sequence
  Cyclic GFR-binding peptide
  MOD_RES (6)..(7): Xaa is C or S
YVPKPXXAPTKLEPISVLYLDDSSNVI

SEQ ID NO: 9716 - protein, 17 aa, Artificial Sequence
  Cyclic GFR-binding peptide
  MOD_RES (3)..(4): Xaa is C or S
KPXXAPTKLEPISVLYL

SEQ ID NO: 9717 - protein, 15 aa, Artificial Sequence
  Cyclic GFR-binding peptide
SPISILYIIGKTPKI

SEQ ID NO: 9718 - protein, 25 aa, Artificial Sequence
  Cyclic GFR-binding peptide
  MOD_RES (6)..(7): Xaa is C or S
KIPKAXXVPTELSPISMLYIDENEK

SEQ ID NO: 9719 - protein, 22 aa, Artificial Sequence
  Cyclic GFR-binding peptide
  MOD_RES (6)..(7): Xaa is C or S
ASASPXXVPQDLEPISILYLVG

SEQ ID NO: 9720 - protein, 24 aa, Artificial Sequence
  Cyclic GFR-binding peptide
  MOD_RES (6)..(7): Xaa is C or S
KASKAXXVPTKLSPISILYKDKGV

SEQ ID NO: 9721 - protein, 17 aa, Artificial Sequence
  Cyclic GFR-binding peptide
KLSPISILYIDKGVVTY

SEQ ID NO: 9722 - protein, 16 aa, Artificial Sequence
  Cyclic GFR-binding peptide
LEPISMLYLDENEKVV

SEQ ID NO: 9723 - protein, 18 aa, Artificial Sequence
  Cyclic GFR-binding peptide
  MOD_RES (4)..(5): Xaa is C or S
ASPXXVPQDLEPISILYL

SEQ ID NO: 9724 - protein, 16 aa, Artificial Sequence
  Cyclic GFR-binding peptide
LSPISVLYIDDSSNVI

SEQ ID NO: 9725 - protein, 20 aa, Artificial Sequence
  Cyclic GFR-binding peptide
  MOD_RES (6)..(7): Xaa is C or S
ASAAPXXVPQALEPISILYL

SEQ ID NO: 9726 - protein, 17 aa, Artificial Sequence
  Cyclic GFR-binding peptide
ELEPISMLYLDENEKVV

SEQ ID NO: 9727 - protein, 16 aa, Artificial Sequence
  Cyclic GFR-binding peptide
LSPISILYIDKGVVTY

SEQ ID NO: 9728 - protein, 17 aa, Artificial Sequence
  Cyclic GFR-binding peptide
KLSPISVLYIDDSSNVI

SEQ ID NO: 9729 - protein, 17 aa, Artificial Sequence
  Cyclic GFR-binding peptide
QLSPISVLYIDDSSNVI

SEQ ID NO: 9730 - protein, 27 aa, Artificial Sequence
  Cyclic GFR-binding peptide
  MOD_RES (6)..(7): Xaa is C or S
ASASPXXVPQDLEPISILYLVGRTPKV

SEQ ID NO: 9731 - protein, 20 aa, Artificial Sequence
  Cyclic GFR-binding peptide
  MOD_RES (6)..(7): Xaa is C or S
KVGKAXXVPTKLSPISVLYI

SEQ ID NO: 9732 - protein, 26 aa, Artificial Sequence
  Cyclic GFR-binding peptide
  MOD_RES (6)..(7): Xaa is C or S
SIPKAXXVPTELSPISMLYIDEYDKV

SEQ ID NO: 9733 - protein, 17 aa, Artificial Sequence
  Cyclic GFR-binding peptide
  MOD_RES (3)..(4): Xaa is C or S
KAXXVPTELEPISMLYL

SEQ ID NO: 9734 - protein, 15 aa, Artificial Sequence
  Cyclic GFR-binding peptide
  MOD_RES (2)..(2): Xaa is C or S
TXAPTKLSPISVLYI

SEQ ID NO: 9735 - protein, 24 aa, Artificial Sequence
  Cyclic GFR-binding peptide
  MOD_RES (6)..(7): Xaa is C or S
YVPKPXXAPTKLSPISVLYIDDSS

SEQ ID NO: 9736 - protein, 15 aa, Artificial Sequence
  Cyclic GFR-binding peptide
EPISILYLVGRTPKV

SEQ ID NO: 9737 - protein, 24 aa, Artificial Sequence
  Cyclic GFR-binding peptide
  MOD_RES (6)..(7): Xaa is C or S
TVPKPXXAPTQLEPISVLYLDDSS

SEQ ID NO: 9738 - protein, 13 aa, Artificial Sequence
  Cyclic GFR-binding peptide
APTKLEPISVLYL

SEQ ID NO: 9739 - protein, 26 aa, Artificial Sequence
  Cyclic GFR-binding peptide
  MOD_RES (6)..(7): Xaa is C or S
ASAAPXXVPQALSPISILYIVGRKPK

SEQ ID NO: 9740 - protein, 22 aa, Artificial Sequence
  Cyclic GFR-binding peptide
  MOD_RES (6)..(7): Xaa is C or S
AAPASXXVPARLSPISILYKDA

SEQ ID NO: 9741 - protein, 22 aa, Artificial Sequence
  Cyclic GFR-binding peptide
  MOD_RES (6)..(7): Xaa is C or S
AAPASXXVPARLEPISILYLDA

SEQ ID NO: 9742 - protein, 16 aa, Artificial Sequence
  Cyclic GFR-binding peptide
LEPISVLYLDDMGVPT

SEQ ID NO: 9743 - protein, 15 aa, Artificial Sequence
  Cyclic GFR-binding peptide
  MOD_RES (1)..(2): Xaa is C or S
XXVPTELSPISMLYI

SEQ ID NO: 9744 - protein, 26 aa, Artificial Sequence
  Cyclic GFR-binding peptide
  MOD_RES (6)..(7): Xaa is C or S
AAPASXXVPARLSPISILYKDAANNV

SEQ ID NO: 9745 - protein, 21 aa, Artificial Sequence
  Cyclic GFR-binding peptide
  MOD_RES (6)..(7): Xaa is C or S
AVPKAXXAPTKLSPISVLYID

SEQ ID NO: 9746 - protein, 19 aa, Artificial Sequence
  Cyclic GFR-binding peptide
PTKLSPISILYIDKGVVTY

SEQ ID NO: 9747 - protein, 26 aa, Artificial Sequence
  Cyclic GFR-binding peptide
  MOD_RES (6)..(7): Xaa is C or S
YVPKPXXAPTKLEPISVLYLDDSSNV

SEQ ID NO: 9748 - protein, 14 aa, Artificial Sequence
  Cyclic GFR-binding peptide
  MOD_RES (1)..(1): Xaa is C or S
XVPTELSPISMLYI

SEQ ID NO: 9749 - protein, 16 aa, Artificial Sequence
  Cyclic GFR-binding peptide
  MOD_RES (2)..(3): Xaa is C or S
PXXVSQDLSPISILYI

SEQ ID NO: 9750 - protein, 23 aa, Artificial Sequence
  Cyclic GFR-binding peptide
  MOD_RES (6)..(7): Xaa is C or S
TVPKPXXAPTQLEPISVLYLDDS

SEQ ID NO: 9751 - protein, 14 aa, Artificial Sequence
  Cyclic GFR-binding peptide
  MOD_RES (1)..(1): Xaa is C or S
XAPTKLEPISVLYL

SEQ ID NO: 9752 - protein, 18 aa, Artificial Sequence
  Cyclic GFR-binding peptide
  MOD_RES (4)..(5): Xaa is C or S
SKAXXVPTKLSPISILYK

SEQ ID NO: 9753 - protein, 18 aa, Artificial Sequence
  Cyclic GFR-binding peptide
  MOD_RES (4)..(5): Xaa is C or S
SKAXXVPTKLSPISILYI

SEQ ID NO: 9754 - protein, 15 aa, Artificial Sequence
  Cyclic GFR-binding peptide
SPISILYIVGRKPKV

SEQ ID NO: 9755 - protein, 27 aa, Artificial Sequence
  Cyclic GFR-binding peptide
  MOD_RES (6)..(7): Xaa is C or S
ASASPXXVPQDLSPISILYIVGRTPKV

SEQ ID NO: 9756 - protein, 14 aa, Artificial Sequence
  Cyclic GFR-binding peptide
  MOD_RES (1)..(1): Xaa is C or S
XVPARLSPISILYK

SEQ ID NO: 9757 - protein, 20 aa, Artificial Sequence
  Cyclic GFR-binding peptide
  MOD_RES (6)..(7): Xaa is C or S
KIPKAXXVPTELEPISMLYL

SEQ ID NO: 9758 - protein, 16 aa, Artificial Sequence
  Cyclic GFR-binding peptide
  MOD_RES (2)..(3): Xaa is C or S
AXXVPTKLEPISVLYL

SEQ ID NO: 9759 - protein, 24 aa, Artificial Sequence
  Cyclic GFR-binding peptide
  MOD_RES (6)..(7): Xaa is C or S
YVPKPXXAPTKLEPISVLYLDDSS

SEQ ID NO: 9760 - protein, 26 aa, Artificial Sequence
  Cyclic GFR-binding peptide
  MOD_RES (6)..(7): Xaa is C or S
KASKAXXVPTKLSPISILYIDKGVVT

SEQ ID NO: 9761 - protein, 26 aa, Artificial Sequence
  Cyclic GFR-binding peptide
  MOD_RES (6)..(7): Xaa is C or S
SIPKAXXVPTELEPISMLYLDEYDKV

SEQ ID NO: 9762 - protein, 25 aa, Artificial Sequence
  Cyclic GFR-binding peptide
  MOD_RES (6)..(7): Xaa is C or S
ASASPXXVSQDLEPISILYLIGKTP

SEQ ID NO: 9763 - protein, 18 aa, Artificial Sequence
  Cyclic GFR-binding peptide
  MOD_RES (4)..(5): Xaa is C or S
PKPXXAPTQLEPISVLYL

SEQ ID NO: 9764 - protein, 17 aa, Artificial Sequence
  Cyclic GFR-binding peptide
  MOD_RES (3)..(4): Xaa is C or S
KAXXVPTKLNAISILYF

SEQ ID NO: 9765 - protein, 20 aa, Artificial Sequence
  Cyclic GFR-binding peptide
  MOD_RES (6)..(7): Xaa is C or S
AAPASXXVPARLSPISILYK

SEQ ID NO: 9766 - protein, 16 aa, Artificial Sequence
  Cyclic GFR-binding peptide
LNAISILYFDAANNVV

SEQ ID NO: 9767 - protein, 16 aa, Artificial Sequence
  Cyclic GFR-binding peptide
  MOD_RES (2)..(3): Xaa is C or S
SXXVPARLEPISILYL

SEQ ID NO: 9768 - protein, 19 aa, Artificial Sequence
  Cyclic GFR-binding peptide
  MOD_RES (6)..(6): Xaa is C or S
VTKPTXAPTKLEPISVLYL

SEQ ID NO: 9769 - protein, 26 aa, Artificial Sequence
  Cyclic GFR-binding peptide
  MOD_RES (6)..(7): Xaa is C or S
ASAAPXXVPQALEPISILYLVGRKPK

SEQ ID NO: 9770 - protein, 15 aa, Artificial Sequence
  Cyclic GFR-binding peptide
SPISVLYIDDSSNVI

SEQ ID NO: 9771 - protein, 17 aa, Artificial Sequence
  Cyclic GFR-binding peptide
  MOD_RES (3)..(4): Xaa is C or S
SPXXVSQDLSPISILYI

SEQ ID NO: 9772 - protein, 21 aa, Artificial Sequence
  Cyclic GFR-binding peptide
  MOD_RES (6)..(7): Xaa is C or S
ASASPXXVSQDLEPISILYLI

SEQ ID NO: 9773 - protein, 21 aa, Artificial Sequence
  Cyclic GFR-binding peptide
  MOD_RES (6)..(7): Xaa is C or S
ASASPXXVPQDLEPISILYLV

SEQ ID NO: 9774 - protein, 21 aa, Artificial Sequence
  Cyclic GFR-binding peptide
  MOD_RES (6)..(7): Xaa is C or S
KVGKAXXVPTKLEPISVLYLD

SEQ ID NO: 9775 - protein, 16 aa, Artificial Sequence
  Cyclic GFR-binding peptide
LSPISILYKDAANNVV

SEQ ID NO: 9776 - protein, 20 aa, Artificial Sequence
  Cyclic GFR-binding peptide
  MOD_RES (6)..(7): Xaa is C or S
AAPASXXVPARLNAISILYF

SEQ ID NO: 9777 - protein, 26 aa, Artificial Sequence
  Cyclic GFR-binding peptide
  MOD_RES (6)..(7): Xaa is C or S
ASASPXXVSQDLSPISILYIIGKTPK

SEQ ID NO: 9778 - protein, 18 aa, Artificial Sequence
  Cyclic GFR-binding peptide
  MOD_RES (4)..(5): Xaa is C or S
ASPXXVSQDLEPISILYL

SEQ ID NO: 9779 - protein, 19 aa, Artificial Sequence
  Cyclic GFR-binding peptide
  MOD_RES (5)..(6): Xaa is C or S
IPKAXXVPTELSPISMLYI

SEQ ID NO: 9780 - protein, 19 aa, Artificial Sequence
  Cyclic GFR-binding peptide
PTKLEPISVLYLDSSNNVI

SEQ ID NO: 9781 - protein, 27 aa, Artificial Sequence
  Cyclic GFR-binding peptide
  MOD_RES (6)..(7): Xaa is C or S
ASASPXXVSQDLEPISILYLIGKTPKI

SEQ ID NO: 9782 - protein, 17 aa, Artificial Sequence
  Cyclic GFR-binding peptide
  MOD_RES (3)..(4): Xaa is C or S
ASXXVPARLSPISILYK

SEQ ID NO: 9783 - protein, 17 aa, Artificial Sequence
  Cyclic GFR-binding peptide
ELSPISMLYIDENEKVV

SEQ ID NO: 9784 - protein, 16 aa, Artificial Sequence
  Cyclic GFR-binding peptide
  MOD_RES (2)..(3): Xaa is C or S
AXXVPTELSPISMLYI

SEQ ID NO: 9785 - protein, 23 aa, Artificial Sequence
  Cyclic GFR-binding peptide
  MOD_RES (6)..(7): Xaa is C or S
YVPKPXXAPTKLSPISVLYIDDS

SEQ ID NO: 9786 - protein, 15 aa, Artificial Sequence
  Cyclic GFR-binding peptide
SPISILYKDKGVVTY

SEQ ID NO: 9787 - protein, 19 aa, Artificial Sequence
  Cyclic GFR-binding peptide
SQDLEPISILYLIGKTPKI

SEQ ID NO: 9788 - protein, 18 aa, Artificial Sequence
  Cyclic GFR-binding peptide
TELSPISMLYIDEYDKVV

SEQ ID NO: 9789 - protein, 15 aa, Artificial Sequence
  Cyclic GFR-binding peptide
EPISILYLVGRKPKV

SEQ ID NO: 9790 - protein, 23 aa, Artificial Sequence
  Cyclic GFR-binding peptide
  MOD_RES (6)..(7): Xaa is C or S
KASKAXXVPTKLSPISILYIDKG

SEQ ID NO: 9791 - protein, 14 aa, Artificial Sequence
  Cyclic GFR-binding peptide
  MOD_RES (1)..(1): Xaa is C or S
XVSQDLSPISILYI

SEQ ID NO: 9792 - protein, 13 aa, Artificial Sequence
  Cyclic GFR-binding peptide
VPTELSPISMLYI

SEQ ID NO: 9793 - protein, 27 aa, Artificial Sequence
  Cyclic GFR-binding peptide
  MOD_RES (6)..(7): Xaa is C or S
SIPKAXXVPTELSPISMLYIDEYDKVV

SEQ ID NO: 9794 - protein, 26 aa, Artificial Sequence
  Cyclic GFR-binding peptide
  MOD_RES (6)..(7): Xaa is C or S
TVPKPXXAPTQLEPISVLYLDDSSNV

SEQ ID NO: 9795 - protein, 21 aa, Artificial Sequence
  Cyclic GFR-binding peptide
  MOD_RES (7)..(7): Xaa is C or S
HVTKPTXAPTKLEPISVLYLD

SEQ ID NO: 9796 - protein, 13 aa, Artificial Sequence
  Cyclic GFR-binding peptide
VPTKLSPISVLYI

SEQ ID NO: 9797 - protein, 18 aa, Artificial Sequence
  Cyclic GFR-binding peptide
TKLSPISVLYIDSSNNVI

SEQ ID NO: 9798 - protein, 17 aa, Artificial Sequence
  Cyclic GFR-binding peptide
KLNAISILYFDKGVVTY

SEQ ID NO: 9799 - protein, 19 aa, Artificial Sequence
  Cyclic GFR-binding peptide
  MOD_RES (5)..(6): Xaa is C or S
VPKAXXAPTKLSPISVLYI

SEQ ID NO: 9800 - protein, 16 aa, Artificial Sequence
  Cyclic GFR-binding peptide
  MOD_RES (2)..(3): Xaa is C or S
AXXVPTKLSPISILYI

SEQ ID NO: 9801 - protein, 18 aa, Artificial Sequence
  Cyclic GFR-binding peptide
TELEPISMLYLDENEKVV

SEQ ID NO: 9802 - protein, 16 aa, Artificial Sequence
  Cyclic GFR-binding peptide
  MOD_RES (2)..(3): Xaa is C or S
AXXVPTKLSPISILYK

SEQ ID NO: 9803 - protein, 18 aa, Artificial Sequence
  Cyclic GFR-binding peptide
TKLSPISILYIDKGVVTY

SEQ ID NO: 9804 - protein, 23 aa, Artificial Sequence
  Cyclic GFR-binding peptide
  MOD_RES (6)..(7): Xaa is C or S
AVPKAXXAPTKLEPISVLYLDSS

SEQ ID NO: 9805 - protein, 22 aa, Artificial Sequence
  Cyclic GFR-binding peptide
  MOD_RES (6)..(7): Xaa is C or S
AAPASXXVPARLNAISILYFDA

SEQ ID NO: 9806 - protein, 13 aa, Artificial Sequence
  Cyclic GFR-binding peptide
VPQALEPISILYL

SEQ ID NO: 9807 - protein, 15 aa, Artificial Sequence
  Cyclic GFR-binding peptide
SPISMLYIDENEKVV

SEQ ID NO: 9808 - protein, 15 aa, Artificial Sequence
  Cyclic GFR-binding peptide
  MOD_RES (1)..(2): Xaa is C or S
XXVPARLEPISILYL

SEQ ID NO: 9809 - protein, 22 aa, Artificial Sequence
  Cyclic GFR-binding peptide
  MOD_RES (6)..(7): Xaa is C or S
KIPKAXXVPTELSPISMLYIDE

SEQ ID NO: 9810 - protein, 23 aa, Artificial Sequence
  Cyclic GFR-binding peptide
  MOD_RES (6)..(7): Xaa is C or S
KVGKAXXVPTKLEPISVLYLDDM

SEQ ID NO: 9811 - protein, 26 aa, Artificial Sequence
  Cyclic GFR-binding peptide
  MOD_RES (7)..(7): Xaa is C or S
HVTKPTXAPTKLEPISVLYLDDSSNV

SEQ ID NO: 9812 - protein, 18 aa, Artificial Sequence
  Cyclic GFR-binding peptide
  MOD_RES (4)..(5): Xaa is C or S
PKAXXAPTKLEPISVLYL

SEQ ID NO: 9813 - protein, 19 aa, Artificial Sequence
  Cyclic GFR-binding peptide
  MOD_RES (5)..(6): Xaa is C or S
ASKAXXVPTKLSPISILYK

SEQ ID NO: 9814 - protein, 26 aa, Artificial Sequence
  Cyclic GFR-binding peptide
  MOD_RES (6)..(7): Xaa is C or S
KVGKAXXVPTKLEPISVLYLDDMGVP

SEQ ID NO: 9815 - protein, 19 aa, Artificial Sequence
  Cyclic GFR-binding peptide
  MOD_RES (5)..(6): Xaa is C or S
ASKAXXVPTKLSPISILYI

SEQ ID NO: 9816 - protein, 27 aa, Artificial Sequence
  Cyclic GFR-binding peptide
  MOD_RES (6)..(7): Xaa is C or S
KASKAXXVPTKLSPISILYIDKGVVTY

SEQ ID NO: 9817 - protein, 16 aa, Artificial Sequence
  Cyclic GFR-binding peptide
  MOD_RES (2)..(3): Xaa is C or S
AXXAPTKLSPISVLYI

SEQ ID NO: 9818 - protein, 25 aa, Artificial Sequence
  Cyclic GFR-binding peptide
  MOD_RES (6)..(7): Xaa is C or S
AAPASXXVPARLSPISILYKDAANN

SEQ ID NO: 9819 - protein, 23 aa, Artificial Sequence
  Cyclic GFR-binding peptide
  MOD_RES (6)..(7): Xaa is C or S
ASAAPXXVPQALEPISILYLVGR

SEQ ID NO: 9820 - protein, 17 aa, Artificial Sequence
  Cyclic GFR-binding peptide
ALSPISILYIVGRKPKV

SEQ ID NO: 9821 - protein, 18 aa, Artificial Sequence
  Cyclic GFR-binding peptide
QDLEPISILYLVGRTPKV

SEQ ID NO: 9822 - protein, 27 aa, Artificial Sequence
  Cyclic GFR-binding peptide
  MOD_RES (6)..(7): Xaa is C or S
AVPKAXXAPTKLEPISVLYLDSSNNVI

SEQ ID NO: 9823 - protein, 16 aa, Artificial Sequence
  Cyclic GFR-binding peptide
  MOD_RES (2)..(3): Xaa is C or S
PXXVPQDLSPISILYI

SEQ ID NO: 9824 - protein, 16 aa, Artificial Sequence
  Cyclic GFR-binding peptide
LSPISVLYIDDMGVPT

SEQ ID NO: 9825 - protein, 15 aa, Artificial Sequence
  Cyclic GFR-binding peptide
  MOD_RES (1)..(2): Xaa is C or S
XXVSQDLSPISILYI

SEQ ID NO: 9826 - protein, 18 aa, Artificial Sequence
  Cyclic GFR-binding peptide
  MOD_RES (4)..(5): Xaa is C or S
PASXXVPARLSPISILYK

SEQ ID NO: 9827 - protein, 15 aa, Artificial Sequence
  Cyclic GFR-binding peptide
EPISILYLIGKTPKI

SEQ ID NO: 9828 - protein, 25 aa, Artificial Sequence
  Cyclic GFR-binding peptide
  MOD_RES (6)..(7): Xaa is C or S
TVPKPXXAPTQLSPISVLYIDDSSN

SEQ ID NO: 9829 - protein, 17 aa, Artificial Sequence
  Cyclic GFR-binding peptide
  MOD_RES (4)..(4): Xaa is C or S
KPTXAPTKLSPISVLYI

SEQ ID NO: 9830 - protein, 26 aa, Artificial Sequence
  Cyclic GFR-binding peptide
  MOD_RES (7)..(7): Xaa is C or S
HVTKPTXAPTKLSPISVLYIDDSSNV

SEQ ID NO: 9831 - protein, 27 aa, Artificial Sequence
  Cyclic GFR-binding peptide
  MOD_RES (6)..(7): Xaa is C or S
ASAAPXXVPQALSPISILYIVGRKPKV

SEQ ID NO: 9832 - protein, 25 aa, Artificial Sequence
  Cyclic GFR-binding peptide
  MOD_RES (6)..(7): Xaa is C or S
KASKAXXVPTKLSPISILYIDKGVV

SEQ ID NO: 9833 - protein, 19 aa, Artificial Sequence
  Cyclic GFR-binding peptide
PTKLSPISVLYIDDMGVPT

SEQ ID NO: 9834 - protein, 20 aa, Artificial Sequence
  Cyclic GFR-binding peptide
  MOD_RES (6)..(7): Xaa is C or S
AVPKAXXAPTKLEPISVLYL

SEQ ID NO: 9835 - protein, 15 aa, Artificial Sequence
  Cyclic GFR-binding peptide
  MOD_RES (1)..(2): Xaa is C or S
XXVPQALSPISILYI

SEQ ID NO: 9836 - protein, 23 aa, Artificial Sequence
  Cyclic GFR-binding peptide
  MOD_RES (6)..(7): Xaa is C or S
ASASPXXVPQDLSPISILYIVGR

SEQ ID NO: 9837 - protein, 21 aa, Artificial Sequence
  Cyclic GFR-binding peptide
  MOD_RES (6)..(7): Xaa is C or S
SIPKAXXVPTELEPISMLYLD

SEQ ID NO: 9838 - protein, 26 aa, Artificial Sequence
  Cyclic GFR-binding peptide
  MOD_RES (6)..(7): Xaa is C or S
KIPKAXXVPTELEPISMLYLDENEKV

SEQ ID NO: 9839 - protein, 18 aa, Artificial Sequence
  Cyclic GFR-binding peptide
TKLEPISVLYLDDSSNVI

SEQ ID NO: 9840 - protein, 14 aa, Artificial Sequence
  Cyclic GFR-binding peptide
  MOD_RES (1)..(1): Xaa is C or S
XVPARLEPISILYL

SEQ ID NO: 9841 - protein, 18 aa, Artificial Sequence
  Cyclic GFR-binding peptide
  MOD_RES (4)..(5): Xaa is C or S
AAPXXVPQALSPISILYI

SEQ ID NO: 9842 - protein, 18 aa, Artificial Sequence
  Cyclic GFR-binding peptide
TQLEPISVLYLDDSSNVI

SEQ ID NO: 9843 - protein, 26 aa, Artificial Sequence
  Cyclic GFR-binding peptide
  MOD_RES (6)..(7): Xaa is C or S
KASKAXXVPTKLNAISILYFDKGVVT

SEQ ID NO: 9844 - protein, 23 aa, Artificial Sequence
  Cyclic GFR-binding peptide
  MOD_RES (6)..(7): Xaa is C or S
AAPASXXVPARLNAISILYFDAA

SEQ ID NO: 9845 - protein, 18 aa, Artificial Sequence
  Cyclic GFR-binding peptide
  MOD_RES (4)..(5): Xaa is C or S
PKPXXAPTQLSPISVLYI

SEQ ID NO: 9846 - protein, 13 aa, Artificial Sequence
  Cyclic GFR-binding peptide
APTQLSPISVLYI

SEQ ID NO: 9847 - protein, 21 aa, Artificial Sequence
  Cyclic GFR-binding peptide
  MOD_RES (6)..(7): Xaa is C or S
TVPKPXXAPTQLEPISVLYLD

SEQ ID NO: 9848 - protein, 13 aa, Artificial Sequence
  Cyclic GFR-binding peptide
VPTKLSPISILYI

SEQ ID NO: 9849 - protein, 13 aa, Artificial Sequence
  Cyclic GFR-binding peptide
VPTKLSPISILYK

SEQ ID NO: 9850 - protein, 27 aa, Artificial Sequence
  Cyclic GFR-binding peptide
  MOD_RES (6)..(7): Xaa is C or S
KASKAXXVPTKLNAISILYFDKGVVTY

SEQ ID NO: 9851 - protein, 24 aa, Artificial Sequence
  Cyclic GFR-binding peptide
  MOD_RES (6)..(7): Xaa is C or S
KASKAXXVPTKLNAISILYFDKGV

SEQ ID NO: 9852 - protein, 23 aa, Artificial Sequence
  Cyclic GFR-binding peptide
  MOD_RES (6)..(7): Xaa is C or S
SIPKAXXVPTELSPISMLYIDEY

SEQ ID NO: 9853 - protein, 14 aa, Artificial Sequence
  Cyclic GFR-binding peptide
  MOD_RES (1)..(1): Xaa is C or S
XVPQDLSPISILYI

SEQ ID NO: 9854 - protein, 13 aa, Artificial Sequence
  Cyclic GFR-binding peptide
VSQDLEPISILYL

SEQ ID NO: 9855 - protein, 27 aa, Artificial Sequence
  Cyclic GFR-binding peptide
  MOD_RES (6)..(7): Xaa is C or S
TVPKPXXAPTQLSPISVLYIDDSSNVI

SEQ ID NO: 9856 - protein, 18 aa, Artificial Sequence
  Cyclic GFR-binding peptide
  MOD_RES (5)..(5): Xaa is C or S
TKPTXAPTKLSPISVLYI

SEQ ID NO: 9857 - protein, 17 aa, Artificial Sequence
  Cyclic GFR-binding peptide
ELSPISMLYIDEYDKVV

SEQ ID NO: 9858 - protein, 19 aa, Artificial Sequence
  Cyclic GFR-binding peptide
PQALSPISILYIVGRKPKV

SEQ ID NO: 9859 - protein, 15 aa, Artificial Sequence
  Cyclic GFR-binding peptide
  MOD_RES (1)..(2): Xaa is C or S
XXVPQDLSPISILYI

SEQ ID NO: 9860 - protein, 20 aa, Artificial Sequence
  Cyclic GFR-binding peptide
  MOD_RES (6)..(7): Xaa is C or S
ASAAPXXVPQALSPISILYI

SEQ ID NO: 9861 - protein, 16 aa, Artificial Sequence
  Cyclic GFR-binding peptide
LEPISMLYLDEYDKVV

SEQ ID NO: 9862 - protein, 16 aa, Artificial Sequence
  Cyclic GFR-binding peptide
  MOD_RES (2)..(3): Xaa is C or S
AXXVPTKLSPISVLYI

SEQ ID NO: 9863 - protein, 18 aa, Artificial Sequence
  Cyclic GFR-binding peptide
QDLEPISILYLIGKTPKI

SEQ ID NO: 9864 - protein, 19 aa, Artificial Sequence
  Cyclic GFR-binding peptide
  MOD_RES (5)..(6): Xaa is C or S
SASPXXVSQDLEPISILYL

SEQ ID NO: 9865 - protein, 17 aa, Artificial Sequence
  Cyclic GFR-binding peptide
  MOD_RES (3)..(4): Xaa is C or S
KPXXAPTKLSPISVLYI

SEQ ID NO: 9866 - protein, 25 aa, Artificial Sequence
  Cyclic GFR-binding peptide
  MOD_RES (6)..(7): Xaa is C or S
TVPKPXXAPTQLEPISVLYLDDSSN

SEQ ID NO: 9867 - protein, 21 aa, Artificial Sequence
  Cyclic GFR-binding peptide
  MOD_RES (6)..(7): Xaa is C or S
YVPKPXXAPTKLSPISVLYID

SEQ ID NO: 9868 - protein, 17 aa, Artificial Sequence
  Cyclic GFR-binding peptide
  MOD_RES (3)..(4): Xaa is C or S
KPXXAPTQLSPISVLYI

SEQ ID NO: 9869 - protein, 23 aa, Artificial Sequence
  Cyclic GFR-binding peptide
  MOD_RES (6)..(7): Xaa is C or S
TVPKPXXAPTQLSPISVLYIDDS

SEQ ID NO: 9870 - protein, 14 aa, Artificial Sequence
  Cyclic GFR-binding peptide
  MOD_RES (1)..(1): Xaa is C or S
XVPARLNAISILYF

SEQ ID NO: 9871 - protein, 25 aa, Artificial Sequence
  Cyclic GFR-binding peptide
  MOD_RES (6)..(7): Xaa is C or S
AAPASXXVPARLNAISILYFDAANN

SEQ ID NO: 9872 - protein, 14 aa, Artificial Sequence
  Cyclic GFR-binding peptide
  MOD_RES (1)..(1): Xaa is C or S
XVPQALSPISILYI

SEQ ID NO: 9873 - protein, 27 aa, Artificial Sequence
  Cyclic GFR-binding peptide
  MOD_RES (6)..(7): Xaa is C or S
KASKAXXVPTKLSPISILYKDKGVVTY

SEQ ID NO: 9874 - protein, 27 aa, Artificial Sequence
  Cyclic GFR-binding peptide
  MOD_RES (6)..(7): Xaa is C or S
KVGKAXXVPTKLSPISVLYIDDMGVPT

SEQ ID NO: 9875 - protein, 18 aa, Artificial Sequence
  Cyclic GFR-binding peptide
  MOD_RES (4)..(5): Xaa is C or S
PKPXXAPTKLSPISVLYI

SEQ ID NO: 9876 - protein, 19 aa, Artificial Sequence
  Cyclic GFR-binding peptide
PTELEPISMLYLDEYDKVV

SEQ ID NO: 9877 - protein, 25 aa, Artificial Sequence
  Cyclic GFR-binding peptide
  MOD_RES (6)..(7): Xaa is C or S
SIPKAXXVPTELEPISMLYLDEYDK

SEQ ID NO: 9878 - protein, 16 aa, Artificial Sequence
  Cyclic GFR-binding peptide
LSPISILYIIGKTPKI

SEQ ID NO: 9879 - protein, 13 aa, Artificial Sequence
  Cyclic GFR-binding peptide
APTKLSPISVLYI

SEQ ID NO: 9880 - protein, 24 aa, Artificial Sequence
  Cyclic GFR-binding peptide
  MOD_RES (6)..(7): Xaa is C or S
ASASPXXVSQDLSPISILYIIGKT

SEQ ID NO: 9881 - protein, 17 aa, Artificial Sequence
  Cyclic GFR-binding peptide
KLSPISILYKDKGVVTY

SEQ ID NO: 9882 - protein, 15 aa, Artificial Sequence
  Cyclic GFR-binding peptide
EPISVLYLDDMGVPT

SEQ ID NO: 9883 - protein, 20 aa, Artificial Sequence
  Cyclic GFR-binding peptide
  MOD_RES (6)..(7): Xaa is C or S
YVPKPXXAPTKLEPISVLYL

SEQ ID NO: 9884 - protein, 26 aa, Artificial Sequence
  Cyclic GFR-binding peptide
  MOD_RES (6)..(7): Xaa is C or S
ASASPXXVPQDLSPISILYIVGRTPK

SEQ ID NO: 9885 - protein, 25 aa, Artificial Sequence
  Cyclic GFR-binding peptide
  MOD_RES (19)..(19): Xaa is C or S
NSSDDFYLVNIPSLKTPAXTPKTVH

SEQ ID NO: 9886 - protein, 25 aa, Artificial Sequence
  Cyclic GFR-binding peptide
  MOD_RES (19)..(20): Xaa is C or S
NNASDFYLINIPSLRTPVXXTPPTS

SEQ ID NO: 9887 - protein, 17 aa, Artificial Sequence
  Cyclic GFR-binding peptide
IVNSSDDFYLVNIPSLK

SEQ ID NO: 9888 - protein, 27 aa, Artificial Sequence
  Cyclic GFR-binding peptide
  MOD_RES (21)..(22): Xaa is C or S
TPVGMDDFYLVNIPSLKTPVXXAKGVK

SEQ ID NO: 9889 - protein, 16 aa, Artificial Sequence
  Cyclic GFR-binding peptide
VVKENEDFYLMNIPSL

SEQ ID NO: 9890 - protein, 13 aa, Artificial Sequence
  Cyclic GFR-binding peptide
FYLINIPSLRTPV

SEQ ID NO: 9891 - protein, 17 aa, Artificial Sequence
  Cyclic GFR-binding peptide
LLVRGNDFYLMNIPSTK

SEQ ID NO: 9892 - protein, 25 aa, Artificial Sequence
  Cyclic GFR-binding peptide
  MOD_RES (19)..(20): Xaa is C or S
VVGKDFYLINIPSLKTPVXXAKSAK

SEQ ID NO: 9893 - protein, 17 aa, Artificial Sequence
  Cyclic GFR-binding peptide
  MOD_RES (14)..(15): Xaa is C or S
FYLVNIPSLKTPAXXAK

SEQ ID NO: 9894 - protein, 15 aa, Artificial Sequence
  Cyclic GFR-binding peptide
  MOD_RES (14)..(15): Xaa is C or S
FYLMNIPSLETPVXX

SEQ ID NO: 9895 - protein, 16 aa, Artificial Sequence
  Cyclic GFR-binding peptide
  MOD_RES (14)..(15): Xaa is C or S
FYLINIPSLRTPVXXT

SEQ ID NO: 9896 - protein, 21 aa, Artificial Sequence
  Cyclic GFR-binding peptide
  MOD_RES (15)..(16): Xaa is C or S
DFYLMNIPSLETPVXXAKPIS

SEQ ID NO: 9897 - protein, 27 aa, Artificial Sequence
  Cyclic GFR-binding peptide
  MOD_RES (21)..(22): Xaa is C or S
VVNNAADFYLINIPSLRAPVXXSAPAA

SEQ ID NO: 9898 - protein, 22 aa, Artificial Sequence
  Cyclic GFR-binding peptide
  MOD_RES (16)..(17): Xaa is C or S
ADFYLINIPSLRAPVXXSAPAA

SEQ ID NO: 9899 - protein, 24 aa, Artificial Sequence
  Cyclic GFR-binding peptide
  MOD_RES (18)..(19): Xaa is C or S
SSDDFYLVNIPSLKTPAXXPKPVH

SEQ ID NO: 9900 - protein, 19 aa, Artificial Sequence
  Cyclic GFR-binding peptide
VVKENEDFYLMNIPSLETP

SEQ ID NO: 9901 - protein, 27 aa, Artificial Sequence
  Cyclic GFR-binding peptide
  MOD_RES (21)..(22): Xaa is C or S
VVNNASDFYLINIPSLRTPVXXTPPTS

SEQ ID NO: 9902 - protein, 13 aa, Artificial Sequence
  Cyclic GFR-binding peptide
FYLINIPSLKTPV

SEQ ID NO: 9903 - protein, 19 aa, Artificial Sequence
  Cyclic GFR-binding peptide
  MOD_RES (14)..(14): Xaa is C or S
FYLVNIPSLKTPAXTPKTV

SEQ ID NO: 9904 - protein, 25 aa, Artificial Sequence
  Cyclic GFR-binding peptide
  MOD_RES (19)..(20): Xaa is C or S
NNSSDFYLVNIPSLKTPAXXAKPVA

SEQ ID NO: 9905 - protein, 13 aa, Artificial Sequence
  Cyclic GFR-binding peptide
FYLVNIPSLQTPA

SEQ ID NO: 9906 - protein, 20 aa, Artificial Sequence
  Cyclic GFR-binding peptide
  MOD_RES (14)..(15): Xaa is C or S
FYLVNIPSLQTPAXXPKPVT

SEQ ID NO: 9907 - protein, 23 aa, Artificial Sequence
  Cyclic GFR-binding peptide
  MOD_RES (17)..(18): Xaa is C or S
GKDFYLINIPSLKTPVXXAKSAK

SEQ ID NO: 9908 - protein, 20 aa, Artificial Sequence
  Cyclic GFR-binding peptide
  MOD_RES (14)..(15): Xaa is C or S
FYLVNIPSLKTPVXXAKGVK

SEQ ID NO: 9909 - protein, 16 aa, Artificial Sequence
  Cyclic GFR-binding peptide
TPVGMDDFYLVNIPSL

SEQ ID NO: 9910 - protein, 21 aa, Artificial Sequence
  Cyclic GFR-binding peptide
  MOD_RES (15)..(16): Xaa is C or S
DFYLMNIPSTKVPAXXTSPVR

SEQ ID NO: 9911 - protein, 14 aa, Artificial Sequence
  Cyclic GFR-binding peptide
  MOD_RES (14)..(14): Xaa is C or S
FYLVNIPSLKTPVX

SEQ ID NO: 9912 - protein, 22 aa, Artificial Sequence
  Cyclic GFR-binding peptide
  MOD_RES (16)..(16): Xaa is C or S
DDFYLVNIPSLKTPAXTPKTVH

SEQ ID NO: 9913 - protein, 23 aa, Artificial Sequence
  Cyclic GFR-binding peptide
  MOD_RES (17)..(18): Xaa is C or S
SDDFYLVNIPSLKTPAXXPKPVY

SEQ ID NO: 9914 - protein, 17 aa, Artificial Sequence
  Cyclic GFR-binding peptide
TPVGMDDFYLVNIPSLK

SEQ ID NO: 9915 - protein, 18 aa, Artificial Sequence
  Cyclic GFR-binding peptide
  MOD_RES (14)..(14): Xaa is C or S
FYLVNIPSLKTPAXTPKT

SEQ ID NO: 9916 - protein, 20 aa, Artificial Sequence
  Cyclic GFR-binding peptide
  MOD_RES (14)..(15): Xaa is C or S
FYLMNIPSLETPVXXAKPIK

SEQ ID NO: 9917 - protein, 15 aa, Artificial Sequence
  Cyclic GFR-binding peptide
  MOD_RES (14)..(15): Xaa is C or S
FYLINIPSLRAPVXX

SEQ ID NO: 9918 - protein, 25 aa, Artificial Sequence
  Cyclic GFR-binding peptide
  MOD_RES (19)..(20): Xaa is C or S
KENEDFYLMNIPSLETPVXXAKPIK

SEQ ID NO: 9919 - protein, 26 aa, Artificial Sequence
  Cyclic GFR-binding peptide
  MOD_RES (20)..(21): Xaa is C or S
PVGMDDFYLVNIPSLKTPVXXAKGVK

SEQ ID NO: 9920 - protein, 24 aa, Artificial Sequence
  Cyclic GFR-binding peptide
  MOD_RES (18)..(19): Xaa is C or S
SSDDFYLVNIPSLQTPAXXPKPVT

SEQ ID NO: 9921 - protein, 27 aa, Artificial Sequence
  Cyclic GFR-binding peptide
  MOD_RES (21)..(21): Xaa is C or S
IVNSSDDFYLVNIPSLKTPAXTPKTVH

SEQ ID NO: 9922 - protein, 17 aa, Artificial Sequence
  Cyclic GFR-binding peptide
  MOD_RES (14)..(15): Xaa is C or S
FYLVNIPSLQTPAXXPK

SEQ ID NO: 9923 - protein, 15 aa, Artificial Sequence
  Cyclic GFR-binding peptide
LLVRGNDFYLMNIPS

SEQ ID NO: 9924 - protein, 23 aa, Artificial Sequence
  Cyclic GFR-binding peptide
  MOD_RES (17)..(18): Xaa is C or S
SDDFYLVNIPSLKTPAXXPKPVH

SEQ ID NO: 9925 - protein, 27 aa, Artificial Sequence
  Cyclic GFR-binding peptide
  MOD_RES (21)..(22): Xaa is C or S
VVKENEDFYLMNIPSLETPVXXAKPIK

SEQ ID NO: 9926 - protein, 18 aa, Artificial Sequence
  Cyclic GFR-binding peptide
  MOD_RES (14)..(15): Xaa is C or S
FYLMNIPSTKVPAXXTSP

SEQ ID NO: 9927 - protein, 15 aa, Artificial Sequence
  Cyclic GFR-binding peptide
YTVVGKDFYLINIPS

SEQ ID NO: 9928 - protein, 18 aa, Artificial Sequence
  Cyclic GFR-binding peptide
  MOD_RES (14)..(15): Xaa is C or S
FYLINIPSLRTPVXXTPP

SEQ ID NO: 9929 - protein, 18 aa, Artificial Sequence
  Cyclic GFR-binding peptide
  MOD_RES (14)..(15): Xaa is C or S
FYLVNIPSLQTPAXXPKP

SEQ ID NO: 9930 - protein, 16 aa, Artificial Sequence
  Cyclic GFR-binding peptide
  MOD_RES (14)..(15): Xaa is C or S
FYLVNIPSLKTPAXXA

SEQ ID NO: 9931 - protein, 26 aa, Artificial Sequence
  Cyclic GFR-binding peptide
  MOD_RES (20)..(21): Xaa is C or S
VNSSDDFYLVNIPSLQTPAXXPKPVT

SEQ ID NO: 9932 - protein, 18 aa, Artificial Sequence
  Cyclic GFR-binding peptide
VVNNAADFYLINIPSLRA

SEQ ID NO: 9933 - protein, 22 aa, Artificial Sequence
  Cyclic GFR-binding peptide
  MOD_RES (16)..(17): Xaa is C or S
DDFYLVNIPSLKTPAXXPKPVY

SEQ ID NO: 9934 - protein, 24 aa, Artificial Sequence
  Cyclic GFR-binding peptide
  MOD_RES (18)..(19): Xaa is C or S
SSDDFYLVNIPSLKTPAXXPKPVY

SEQ ID NO: 9935 - protein, 13 aa, Artificial Sequence
  Cyclic GFR-binding peptide
FYLINIPSLRAPV

SEQ ID NO: 9936 - protein, 19 aa, Artificial Sequence
  Cyclic GFR-binding peptide
LLVRGNDFYLMNIPSTKVP

SEQ ID NO: 9937 - protein, 17 aa, Artificial Sequence
  Cyclic GFR-binding peptide
VVKENEDFYLMNIPSLE

SEQ ID NO: 9938 - protein, 20 aa, Artificial Sequence
  Cyclic GFR-binding peptide
  MOD_RES (14)..(15): Xaa is C or S
FYLVNIPSLKTPAXXPKPVH

SEQ ID NO: 9939 - protein, 15 aa, Artificial Sequence
  Cyclic GFR-binding peptide
  MOD_RES (14)..(15): Xaa is C or S
FYLINIPSLRTPVXX

SEQ ID NO: 9940 - protein, 22 aa, Artificial Sequence
  Cyclic GFR-binding peptide
  MOD_RES (16)..(17): Xaa is C or S
EDFYLMNIPSLETPVXXAKPIK

SEQ ID NO: 9941 - protein, 16 aa, Artificial Sequence
  Cyclic GFR-binding peptide
IVNNSSDFYLVNIPSL

SEQ ID NO: 9942 - protein, 15 aa, Artificial Sequence
  Cyclic GFR-binding peptide
IVNNSSDFYLVNIPS

SEQ ID NO: 9943 - protein, 16 aa, Artificial Sequence
  Cyclic GFR-binding peptide
  MOD_RES (14)..(14): Xaa is C or S
FYLVNIPSLKTPAXTP

SEQ ID NO: 9944 - protein, 26 aa, Artificial Sequence
  Cyclic GFR-binding peptide
  MOD_RES (20)..(21): Xaa is C or S
VNSSDDFYLVNIPSLKTPAXXPKPVY

SEQ ID NO: 9945 - protein, 21 aa, Artificial Sequence
  Cyclic GFR-binding peptide
  MOD_RES (15)..(16): Xaa is C or S
DFYLMNIPSLETPVXXAKPIK

SEQ ID NO: 9946 - protein, 23 aa, Artificial Sequence
  Cyclic GFR-binding peptide
  MOD_RES (17)..(18): Xaa is C or S
SDDFYLVNIPSLQTPAXXPKPVT

SEQ ID NO: 9947 - protein, 25 aa, Artificial Sequence
  Cyclic GFR-binding peptide
  MOD_RES (19)..(20): Xaa is C or S
NSSDDFYLVNIPSLKTPAXXPKPVY

SEQ ID NO: 9948 - protein, 17 aa, Artificial Sequence
  Cyclic GFR-binding peptide
  MOD_RES (14)..(15): Xaa is C or S
FYLMNIPSLETPVXXAK

SEQ ID NO: 9949 - protein, 23 aa, Artificial Sequence
  Cyclic GFR-binding peptide
  MOD_RES (17)..(18): Xaa is C or S
AADFYLINIPSLRAPVXXSAPAA

SEQ ID NO: 9950 - protein, 15 aa, Artificial Sequence
  Cyclic GFR-binding peptide
  MOD_RES (14)..(15): Xaa is C or S
FYLINIPSLKTPVXX

SEQ ID NO: 9951 - protein, 22 aa, Artificial Sequence
  Cyclic GFR-binding peptide
  MOD_RES (16)..(17): Xaa is C or S
DDFYLVNIPSLKTPVXXAKGVK

SEQ ID NO: 9952 - protein, 18 aa, Artificial Sequence
  Cyclic GFR-binding peptide
  MOD_RES (14)..(15): Xaa is C or S
FYLVNIPSLKTPVXXAKG

SEQ ID NO: 9953 - protein, 19 aa, Artificial Sequence
  Cyclic GFR-binding peptide
  MOD_RES (14)..(15): Xaa is C or S
FYLMNIPSTKVPAXXTSPV

SEQ ID NO: 9954 - protein, 15 aa, Artificial Sequence
  Cyclic GFR-binding peptide
  MOD_RES (14)..(15): Xaa is C or S
FYLVNIPSLQTPAXX

SEQ ID NO: 9955 - protein, 19 aa, Artificial Sequence
  Cyclic GFR-binding peptide
VVNNAADFYLINIPSLRAP

SEQ ID NO: 9956 - protein, 24 aa, Artificial Sequence
  Cyclic GFR-binding peptide
  MOD_RES (18)..(19): Xaa is C or S
VGKDFYLINIPSLKTPVXXAKSAK

SEQ ID NO: 9957 - protein, 18 aa, Artificial Sequence
  Cyclic GFR-binding peptide
IVNNSSDFYLVNIPSLKT

SEQ ID NO: 9958 - protein, 20 aa, Artificial Sequence
  Cyclic GFR-binding peptide
  MOD_RES (14)..(15): Xaa is C or S
FYLVNIPSLKTPAXXPKPVY

SEQ ID NO: 9959 - protein, 24 aa, Artificial Sequence
  Cyclic GFR-binding peptide
  MOD_RES (18)..(19): Xaa is C or S
NSSDFYLVNIPSLKTPAXXAKPVA

SEQ ID NO: 9960 - protein, 18 aa, Artificial Sequence
  Cyclic GFR-binding peptide
  MOD_RES (14)..(15): Xaa is C or S
FYLINIPSLRAPVXXSAP

SEQ ID NO: 9961 - protein, 26 aa, Artificial Sequence
  Cyclic GFR-binding peptide
  MOD_RES (20)..(21): Xaa is C or S
VNNASDFYLINIPSLRTPVXXTPPTS

SEQ ID NO: 9962 - protein, 22 aa, Artificial Sequence
  Cyclic GFR-binding peptide
  MOD_RES (16)..(17): Xaa is C or S
DDFYLVNIPSLQTPAXXPKPVT

SEQ ID NO: 9963 - protein, 14 aa, Artificial Sequence
  Cyclic GFR-binding peptide
  MOD_RES (14)..(14): Xaa is C or S
FYLMNIPSTKVPAX

SEQ ID NO: 9964 - protein, 26 aa, Artificial Sequence
  Cyclic GFR-binding peptide
  MOD_RES (20)..(21): Xaa is C or S
TVVGKDFYLINIPSLKTPVXXAKSAK

SEQ ID NO: 9965 - protein, 23 aa, Artificial Sequence
  Cyclic GFR-binding peptide
  MOD_RES (17)..(18): Xaa is C or S
GNDFYLMNIPSTKVPAXXTSPVR

SEQ ID NO: 9966 - protein, 26 aa, Artificial Sequence
  Cyclic GFR-binding peptide
  MOD_RES (20)..(21): Xaa is C or S
VNNAADFYLINIPSLRAPVXXSAPAA

SEQ ID NO: 9967 - protein, 21 aa, Artificial Sequence
  Cyclic GFR-binding peptide
  MOD_RES (15)..(15): Xaa is C or S
DFYLVNIPSLKTPAXTPKTVH

SEQ ID NO: 9968 - protein, 26 aa, Artificial Sequence
  Cyclic GFR-binding peptide
  MOD_RES (20)..(21): Xaa is C or S
LVRGNDFYLMNIPSTKVPAXXTSPVR

SEQ ID NO: 9969 - protein, 25 aa, Artificial Sequence
  Cyclic GFR-binding peptide
  MOD_RES (19)..(20): Xaa is C or S
NSSDDFYLVNIPSLQTPAXXPKPVT

SEQ ID NO: 9970 - protein, 18 aa, Artificial Sequence
  Cyclic GFR-binding peptide
LLVRGNDFYLMNIPSTKV

SEQ ID NO: 9971 - protein, 23 aa, Artificial Sequence
  Cyclic GFR-binding peptide
  MOD_RES (17)..(18): Xaa is C or S
ASDFYLINIPSLRTPVXXTPPTS

SEQ ID NO: 9972 - protein, 17 aa, Artificial Sequence
  Cyclic GFR-binding peptide
YTVVGKDFYLINIPSLK

SEQ ID NO: 9973 - protein, 25 aa, Artificial Sequence
  Cyclic GFR-binding peptide
  MOD_RES (19)..(20): Xaa is C or S
VRGNDFYLMNIPSTKVPAXXTSPVR

SEQ ID NO: 9974 - protein, 18 aa, Artificial Sequence
  Cyclic GFR-binding peptide
YTVVGKDFYLINIPSLKT

SEQ ID NO: 9975 - protein, 17 aa, Artificial Sequence
  Cyclic GFR-binding peptide
  MOD_RES (14)..(15): Xaa is C or S
FYLINIPSLRAPVXXSA

SEQ ID NO: 9976 - protein, 17 aa, Artificial Sequence
  Cyclic GFR-binding peptide
IVNNSSDFYLVNIPSLK

SEQ ID NO: 9977 - protein, 14 aa, Artificial Sequence
  Cyclic GFR-binding peptide
  MOD_RES (14)..(14): Xaa is C or S
FYLVNIPSLKTPAX

SEQ ID NO: 9978 - protein, 16 aa, Artificial Sequence
  Cyclic GFR-binding peptide
YTVVGKDFYLINIPSL

SEQ ID NO: 9979 - protein, 24 aa, Artificial Sequence
  Cyclic GFR-binding peptide
  MOD_RES (18)..(19): Xaa is C or S
NAADFYLINIPSLRAPVXXSAPAA

SEQ ID NO: 9980 - protein, 20 aa, Artificial Sequence
  Cyclic GFR-binding peptide
  MOD_RES (14)..(15): Xaa is C or S
FYLVNIPSLKTPAXXAKPVA

SEQ ID NO: 9981 - protein, 19 aa, Artificial Sequence
  Cyclic GFR-binding peptide
  MOD_RES (14)..(15): Xaa is C or S
FYLINIPSLRTPVXXTPPT

SEQ ID NO: 9982 - protein, 19 aa, Artificial Sequence
  Cyclic GFR-binding peptide
TPVGMDDFYLVNIPSLKTP

SEQ ID NO: 9983 - protein, 27 aa, Artificial Sequence
  Cyclic GFR-binding peptide
  MOD_RES (21)..(22): Xaa is C or S
IVNSSDDFYLVNIPSLKTPAXXPKPVY

SEQ ID NO: 9984 - protein, 19 aa, Artificial Sequence
  Cyclic GFR-binding peptide
  MOD_RES (14)..(15): Xaa is C or S
FYLVNIPSLKTPAXXPKPV

SEQ ID NO: 9985 - protein, 19 aa, Artificial Sequence
  Cyclic GFR-binding peptide
  MOD_RES (14)..(15): Xaa is C or S
FYLINIPSLKTPVXXAKSA

SEQ ID NO: 9986 - protein, 17 aa, Artificial Sequence
  Cyclic GFR-binding peptide
  MOD_RES (14)..(15): Xaa is C or S
FYLVNIPSLKTPVXXAK

SEQ ID NO: 9987 - protein, 20 aa, Artificial Sequence
  Cyclic GFR-binding peptide
  MOD_RES (14)..(15): Xaa is C or S
FYLMNIPSTKVPAXXTSPVR

SEQ ID NO: 9988 - protein, 22 aa, Artificial Sequence
  Cyclic GFR-binding peptide
  MOD_RES (16)..(17): Xaa is C or S
SDFYLINIPSLRTPVXXTPPTS

SEQ ID NO: 9989 - protein, 21 aa, Artificial Sequence
  Cyclic GFR-binding peptide
  MOD_RES (15)..(16): Xaa is C or S
DFYLVNIPSLQTPAXXPKPVT

SEQ ID NO: 9990 - protein, 16 aa, Artificial Sequence
  Cyclic GFR-binding peptide
  MOD_RES (14)..(15): Xaa is C or S
FYLMNIPSLETPVXXA

SEQ ID NO: 9991 - protein, 26 aa, Artificial Sequence
  Cyclic GFR-binding peptide
  MOD_RES (20)..(21): Xaa is C or S
VKDYEDFYLMNIPSLETPVXXAKPIS

SEQ ID NO: 9992 - protein, 25 aa, Artificial Sequence
  Cyclic GFR-binding peptide
  MOD_RES (19)..(20): Xaa is C or S
NSSDDFYLVNIPSLKTPAXXPKPVH

SEQ ID NO: 9993 - protein, 25 aa, Artificial Sequence
  Cyclic GFR-binding peptide
  MOD_RES (19)..(20): Xaa is C or S
KDYEDFYLMNIPSLETPVXXAKPIS

SEQ ID NO: 9994 - protein, 13 aa, Artificial Sequence
  Cyclic GFR-binding peptide
FYLVNIPSLKTPA

SEQ ID NO: 9995 - protein, 26 aa, Artificial Sequence
  Cyclic GFR-binding peptide
  MOD_RES (20)..(21): Xaa is C or S
VNSSDDFYLVNIPSLKTPAXXPKPVH

SEQ ID NO: 9996 - protein, 21 aa, Artificial Sequence
  Cyclic GFR-binding peptide
  MOD_RES (15)..(16): Xaa is C or S
DFYLINIPSLRTPVXXTPPTS

SEQ ID NO: 9997 - protein, 14 aa, Artificial Sequence
  Cyclic GFR-binding peptide
  MOD_RES (14)..(14): Xaa is C or S
FYLINIPSLKTPVX

SEQ ID NO: 9998 - protein, 27 aa, Artificial Sequence
  Cyclic GFR-binding peptide
  MOD_RES (21)..(22): Xaa is C or S
IVNNSSDFYLVNIPSLKTPAXXAKPVA

SEQ ID NO: 9999 - protein, 16 aa, Artificial Sequence
  Cyclic GFR-binding peptide
  MOD_RES (14)..(15): Xaa is C or S
FYLINIPSLRAPVXXS

SEQ ID NO: 10000 - protein, 15 aa, Artificial Sequence
  Cyclic GFR-binding peptide
  MOD_RES (14)..(15): Xaa is C or S
FYLMNIPSTKVPAXX

SEQ ID NO: 10001 - protein, 21 aa, Artificial Sequence
  Cyclic GFR-binding peptide
  MOD_RES (15)..(16): Xaa is C or S
DFYLINIPSLRAPVXXSAPAA

SEQ ID NO: 10002 - protein, 14 aa, Artificial Sequence
  Cyclic GFR-binding peptide
  MOD_RES (14)..(14): Xaa is C or S
FYLVNIPSLQTPAX

SEQ ID NO: 10003 - protein, 27 aa, Artificial Sequence
  Cyclic GFR-binding peptide
  MOD_RES (21)..(22): Xaa is C or S
YTVVGKDFYLINIPSLKTPVXXAKSAK

SEQ ID NO: 10004 - protein, 19 aa, Artificial Sequence
  Cyclic GFR-binding peptide
  MOD_RES (14)..(15): Xaa is C or S
FYLMNIPSLETPVXXAKPI

SEQ ID NO: 10005 - protein, 27 aa, Artificial Sequence
  Cyclic GFR-binding peptide
  MOD_RES (21)..(22): Xaa is C or S
VVKDYEDFYLMNIPSLETPVXXAKPIS

SEQ ID NO: 10006 - protein, 21 aa, Artificial Sequence
  Cyclic GFR-binding peptide
  MOD_RES (15)..(16): Xaa is C or S
DFYLVNIPSLKTPVXXAKGVK

SEQ ID NO: 10007 - protein, 23 aa, Artificial Sequence
  Cyclic GFR-binding peptide
  MOD_RES (17)..(17): Xaa is C or S
SDDFYLVNIPSLKTPAXTPKTVH

SEQ ID NO: 10008 - protein, 20 aa, Artificial Sequence
  Cyclic GFR-binding peptide
  MOD_RES (14)..(15): Xaa is C or S
FYLINIPSLRAPVXXSAPAA

SEQ ID NO: 10009 - protein, 13 aa, Artificial Sequence
  Cyclic GFR-binding peptide
FYLVNIPSLKTPV

SEQ ID NO: 10010 - protein, 18 aa, Artificial Sequence
  Cyclic GFR-binding peptide
VVKENEDFYLMNIPSLET

SEQ ID NO: 10011 - protein, 26 aa, Artificial Sequence
  Cyclic GFR-binding peptide
  MOD_RES (20)..(21): Xaa is C or S
VNNSSDFYLVNIPSLKTPAXXAKPVA

SEQ ID NO: 10012 - protein, 15 aa, Artificial Sequence
  Cyclic GFR-binding peptide
TPVGMDDFYLVNIPS

SEQ ID NO: 10013 - protein, 17 aa, Artificial Sequence
  Cyclic GFR-binding peptide
VVNNASDFYLINIPSLR

SEQ ID NO: 10014 - protein, 14 aa, Artificial Sequence
  Cyclic GFR-binding peptide
  MOD_RES (14)..(14): Xaa is C or S
FYLINIPSLRTPVX

SEQ ID NO: 10015 - protein, 17 aa, Artificial Sequence
  Cyclic GFR-binding peptide
  MOD_RES (14)..(14): Xaa is C or S
FYLVNIPSLKTPAXTPK

SEQ ID NO: 10016 - protein, 20 aa, Artificial Sequence
  Cyclic GFR-binding peptide
  MOD_RES (14)..(15): Xaa is C or S
FYLINIPSLKTPVXXAKSAK

SEQ ID NO: 10017 - protein, 20 aa, Artificial Sequence
  Cyclic GFR-binding peptide
  MOD_RES (14)..(15): Xaa is C or S
FYLMNIPSLETPVXXAKPIS

SEQ ID NO: 10018 - protein, 17 aa, Artificial Sequence
  Cyclic GFR-binding peptide
  MOD_RES (14)..(15): Xaa is C or S
FYLINIPSLRTPVXXTP

SEQ ID NO: 10019 - protein, 16 aa, Artificial Sequence
  Cyclic GFR-binding peptide
  MOD_RES (14)..(15): Xaa is C or S
FYLMNIPSTKVPAXXT

SEQ ID NO: 10020 - protein, 15 aa, Artificial Sequence
  Cyclic GFR-binding peptide
VVKDYEDFYLMNIPS

SEQ ID NO: 10021 - protein, 18 aa, Artificial Sequence
  Cyclic GFR-binding peptide
  MOD_RES (14)..(15): Xaa is C or S
FYLMNIPSLETPVXXAKP

SEQ ID NO: 10022 - protein, 16 aa, Artificial Sequence
  Cyclic GFR-binding peptide
VVNNAADFYLINIPSL

SEQ ID NO: 10023 - protein, 16 aa, Artificial Sequence
  Cyclic GFR-binding peptide
  MOD_RES (14)..(15): Xaa is C or S
FYLVNIPSLKTPAXXP

SEQ ID NO: 10024 - protein, 15 aa, Artificial Sequence
  Cyclic GFR-binding peptide
VVKENEDFYLMNIPS

SEQ ID NO: 10025 - protein, 19 aa, Artificial Sequence
  Cyclic GFR-binding peptide
  MOD_RES (14)..(15): Xaa is C or S
FYLVNIPSLKTPAXXAKPV

SEQ ID NO: 10026 - protein, 13 aa, Artificial Sequence
  Cyclic GFR-binding peptide
FYLMNIPSTKVPA

SEQ ID NO: 10027 - protein, 24 aa, Artificial Sequence
  Cyclic GFR-binding peptide
  MOD_RES (18)..(19): Xaa is C or S
RGNDFYLMNIPSTKVPAXXTSPVR

SEQ ID NO: 10028 - protein, 19 aa, Artificial Sequence
  Cyclic GFR-binding peptide
YTVVGKDFYLINIPSLKTP

SEQ ID NO: 10029 - protein, 24 aa, Artificial Sequence
  Cyclic GFR-binding peptide
  MOD_RES (18)..(19): Xaa is C or S
DYEDFYLMNIPSLETPVXXAKPIS

SEQ ID NO: 10030 - protein, 18 aa, Artificial Sequence
  Cyclic GFR-binding peptide
TPVGMDDFYLVNIPSLKT

SEQ ID NO: 10031 - protein, 16 aa, Artificial Sequence
  Cyclic GFR-binding peptide
LLVRGNDFYLMNIPST

SEQ ID NO: 10032 - protein, 19 aa, Artificial Sequence
  Cyclic GFR-binding peptide
IVNNSSDFYLVNIPSLKTP

SEQ ID NO: 10033 - protein, 23 aa, Artificial Sequence
  Cyclic GFR-binding peptide
  MOD_RES (17)..(18): Xaa is C or S
YEDFYLMNIPSLETPVXXAKPIS

SEQ ID NO: 10034 - protein, 19 aa, Artificial Sequence
  Cyclic GFR-binding peptide
IVNSSDDFYLVNIPSLKTP

SEQ ID NO: 10035 - protein, 14 aa, Artificial Sequence
  Cyclic GFR-binding peptide
  MOD_RES (14)..(14): Xaa is C or S
FYLMNIPSLETPVX

SEQ ID NO: 10036 - protein, 19 aa, Artificial Sequence
  Cyclic GFR-binding peptide
  MOD_RES (14)..(15): Xaa is C or S
FYLVNIPSLQTPAXXPKPV

SEQ ID NO: 10037 - protein, 16 aa, Artificial Sequence
  Cyclic GFR-binding peptide
VVNNASDFYLINIPSL

SEQ ID NO: 10038 - protein, 16 aa, Artificial Sequence
  Cyclic GFR-binding peptide
  MOD_RES (14)..(15): Xaa is C or S
FYLVNIPSLKTPVXXA

SEQ ID NO: 10039 - protein, 19 aa, Artificial Sequence
  Cyclic GFR-binding peptide
IVNSSDDFYLVNIPSLQTP

SEQ ID NO: 10040 - protein, 24 aa, Artificial Sequence
  Cyclic GFR-binding peptide
  MOD_RES (18)..(19): Xaa is C or S
ENEDFYLMNIPSLETPVXXAKPIK

SEQ ID NO: 10041 - protein, 18 aa, Artificial Sequence
  Cyclic GFR-binding peptide
  MOD_RES (14)..(15): Xaa is C or S
FYLVNIPSLKTPAXXPKP

SEQ ID NO: 10042 - protein, 25 aa, Artificial Sequence
  Cyclic GFR-binding peptide
  MOD_RES (19)..(20): Xaa is C or S
NNAADFYLINIPSLRAPVXXSAPAA

SEQ ID NO: 10043 - protein, 19 aa, Artificial Sequence
  Cyclic GFR-binding peptide
VVKDYEDFYLMNIPSLETP

SEQ ID NO: 10044 - protein, 19 aa, Artificial Sequence
  Cyclic GFR-binding peptide
VVNNASDFYLINIPSLRTP

SEQ ID NO: 10045 - protein, 23 aa, Artificial Sequence
  Cyclic GFR-binding peptide
  MOD_RES (17)..(18): Xaa is C or S
MDDFYLVNIPSLKTPVXXAKGVK

SEQ ID NO: 10046 - protein, 18 aa, Artificial Sequence
  Cyclic GFR-binding peptide
  MOD_RES (14)..(15): Xaa is C or S
FYLINIPSLKTPVXXAKS

SEQ ID NO: 10047 - protein, 13 aa, Artificial Sequence
  Cyclic GFR-binding peptide
FYLMNIPSLETPV

SEQ ID NO: 10048 - protein, 24 aa, Artificial Sequence
  Cyclic GFR-binding peptide
  MOD_RES (18)..(19): Xaa is C or S
NASDFYLINIPSLRTPVXXTPPTS

SEQ ID NO: 10049 - protein, 16 aa, Artificial Sequence
  Cyclic GFR-binding peptide
  MOD_RES (14)..(15): Xaa is C or S
FYLINIPSLKTPVXXA

SEQ ID NO: 10050 - protein, 22 aa, Artificial Sequence
  Cyclic GFR-binding peptide
  MOD_RES (16)..(17): Xaa is C or S
EDFYLMNIPSLETPVXXAKPIS

SEQ ID NO: 10051 - protein, 16 aa, Artificial Sequence
  Cyclic GFR-binding peptide
IVNSSDDFYLVNIPSL

SEQ ID NO: 10052 - protein, 21 aa, Artificial Sequence
  Cyclic GFR-binding peptide
  MOD_RES (15)..(16): Xaa is C or S
DFYLVNIPSLKTPAXXPKPVY

SEQ ID NO: 10053 - protein, 15 aa, Artificial Sequence
  Cyclic GFR-binding peptide
  MOD_RES (14)..(15): Xaa is C or S
FYLVNIPSLKTPVXX

SEQ ID NO: 10054 - protein, 23 aa, Artificial Sequence
  Cyclic GFR-binding peptide
  MOD_RES (17)..(18): Xaa is C or S
SSDFYLVNIPSLKTPAXXAKPVA

SEQ ID NO: 10055 - protein, 15 aa, Artificial Sequence
  Cyclic GFR-binding peptide
IVNSSDDFYLVNIPS

SEQ ID NO: 10056 - protein, 15 aa, Artificial Sequence
  Cyclic GFR-binding peptide
  MOD_RES (14)..(15): Xaa is C or S
FYLVNIPSLKTPAXX

SEQ ID NO: 10057 - protein, 26 aa, Artificial Sequence
  Cyclic GFR-binding peptide
  MOD_RES (20)..(20): Xaa is C or S
VNSSDDFYLVNIPSLKTPAXTPKTVH

SEQ ID NO: 10058 - protein, 17 aa, Artificial Sequence
  Cyclic GFR-binding peptide
VVNNAADFYLINIPSLR

SEQ ID NO: 10059 - protein, 21 aa, Artificial Sequence
  Cyclic GFR-binding peptide
  MOD_RES (15)..(16): Xaa is C or S
DFYLVNIPSLKTPAXXAKPVA

SEQ ID NO: 10060 - skipped

SEQ ID NO: 10061 - protein, 21 aa, Artificial Sequence
  Cyclic GFR-binding peptide
  MOD_RES (15)..(16): Xaa is C or S
DFYLVNIPSLKTPAXXPKPVH

SEQ ID NO: 10062 - protein, 18 aa, Artificial Sequence
  Cyclic GFR-binding peptide
VVNNASDFYLINIPSLRT

SEQ ID NO: 10063 - protein, 17 aa, Artificial Sequence
  Cyclic GFR-binding peptide
  MOD_RES (14)..(15): Xaa is C or S
FYLMNIPSTKVPAXXTS

SEQ ID NO: 10064 - protein, 15 aa, Artificial Sequence
  Cyclic GFR-binding peptide
  MOD_RES (14)..(14): Xaa is C or S
FYLVNIPSLKTPAXT

SEQ ID NO: 10065 - protein, 27 aa, Artificial Sequence
  Cyclic GFR-binding peptide
  MOD_RES (21)..(22): Xaa is C or S
IVNSSDDFYLVNIPSLKTPAXXPKPVH

SEQ ID NO: 10066 - protein, 26 aa, Artificial Sequence
  Cyclic GFR-binding peptide
  MOD_RES (20)..(21): Xaa is C or S
VKENEDFYLMNIPSLETPVXXAKPIK

SEQ ID NO: 10067 - protein, 23 aa, Artificial Sequence
  Cyclic GFR-binding peptide
  MOD_RES (17)..(18): Xaa is C or S
NEDFYLMNIPSLETPVXXAKPIK

SEQ ID NO: 10068 - protein, 16 aa, Artificial Sequence
  Cyclic GFR-binding peptide
  MOD_RES (14)..(15): Xaa is C or S
FYLVNIPSLQTPAXXP

SEQ ID NO: 10069 - protein, 24 aa, Artificial Sequence
  Cyclic GFR-binding peptide
  MOD_RES (18)..(19): Xaa is C or S
GMDDFYLVNIPSLKTPVXXAKGVK

SEQ ID NO: 10070 - protein, 22 aa, Artificial Sequence
  Cyclic GFR-binding peptide
  MOD_RES (16)..(17): Xaa is C or S
KDFYLINIPSLKTPVXXAKSAK

SEQ ID NO: 10071 - protein, 18 aa, Artificial Sequence
  Cyclic GFR-binding peptide
  MOD_RES (14)..(15): Xaa is C or S
FYLVNIPSLKTPAXXAKP

SEQ ID NO: 10072 - protein, 19 aa, Artificial Sequence
  Cyclic GFR-binding peptide
  MOD_RES (14)..(15): Xaa is C or S
FYLINIPSLRAPVXXSAPA

SEQ ID NO: 10073 - protein, 25 aa, Artificial Sequence
  Cyclic GFR-binding peptide
  MOD_RES (19)..(20): Xaa is C or S
VGMDDFYLVNIPSLKTPVXXAKGVK

SEQ ID NO: 10074 - protein, 24 aa, Artificial Sequence
  Cyclic GFR-binding peptide
  MOD_RES (18)..(18): Xaa is C or S
SSDDFYLVNIPSLKTPAXTPKTVH

SEQ ID NO: 10075 - protein, 17 aa, Artificial Sequence
  Cyclic GFR-binding peptide
  MOD_RES (14)..(15): Xaa is C or S
FYLINIPSLKTPVXXAK

SEQ ID NO: 10076 - protein, 16 aa, Artificial Sequence
  Cyclic GFR-binding peptide
VVKDYEDFYLMNIPSL

SEQ ID NO: 10077 - protein, 22 aa, Artificial Sequence
  Cyclic GFR-binding peptide
  MOD_RES (16)..(17): Xaa is C or S
DDFYLVNIPSLKTPAXXPKPVH

SEQ ID NO: 10078 - protein, 17 aa, Artificial Sequence
  Cyclic GFR-binding peptide
IVNSSDDFYLVNIPSLQ

SEQ ID NO: 10079 - protein, 17 aa, Artificial Sequence
  Cyclic GFR-binding peptide
  MOD_RES (14)..(15): Xaa is C or S
FYLVNIPSLKTPAXXPK

SEQ ID NO: 10080 - protein, 27 aa, Artificial Sequence
  Cyclic GFR-binding peptide
  MOD_RES (21)..(22): Xaa is C or S
IVNSSDDFYLVNIPSLQTPAXXPKPVT

SEQ ID NO: 10081 - protein, 20 aa, Artificial Sequence
  Cyclic GFR-binding peptide
  MOD_RES (14)..(15): Xaa is C or S
FYLINIPSLRTPVXXTPPTS

SEQ ID NO: 10082 - protein, 27 aa, Artificial Sequence
  Cyclic GFR-binding peptide
  MOD_RES (21)..(22): Xaa is C or S
LLVRGNDFYLMNIPSTKVPAXXTSPVR

SEQ ID NO: 10083 - protein, 17 aa, Artificial Sequence
  Cyclic GFR-binding peptide
VVKDYEDFYLMNIPSLE

SEQ ID NO: 10084 - protein, 21 aa, Artificial Sequence
  Cyclic GFR-binding peptide
  MOD_RES (15)..(16): Xaa is C or S
DFYLINIPSLKTPVXXAKSAK

SEQ ID NO: 10085 - protein, 19 aa, Artificial Sequence
  Cyclic GFR-binding peptide
  MOD_RES (14)..(15): Xaa is C or S
FYLVNIPSLKTPVXXAKGV

SEQ ID NO: 10086 - protein, 18 aa, Artificial Sequence
  Cyclic GFR-binding peptide
IVNSSDDFYLVNIPSLQT

SEQ ID NO: 10087 - protein, 15 aa, Artificial Sequence
  Cyclic GFR-binding peptide
VVNNAADFYLINIPS

SEQ ID NO: 10088 - protein, 18 aa, Artificial Sequence
  Cyclic GFR-binding peptide
IVNSSDDFYLVNIPSLKT

SEQ ID NO: 10089 - protein, 18 aa, Artificial Sequence
  Cyclic GFR-binding peptide
VVKDYEDFYLMNIPSLET

SEQ ID NO: 10090 - protein, 15 aa, Artificial Sequence
  Cyclic GFR-binding peptide
VVNNASDFYLINIPS

SEQ ID NO: 10091 - protein, 20 aa, Artificial Sequence
  Cyclic GFR-binding peptide
  MOD_RES (14)..(14): Xaa is C or S
FYLVNIPSLKTPAXTPKTVH

SEQ ID NO: 10092 - protein, 22 aa, Artificial Sequence
  Cyclic GFR-binding peptide
  MOD_RES (16)..(17): Xaa is C or S
NDFYLMNIPSTKVPAXXTSPVR

SEQ ID NO: 10093 - protein, 14 aa, Artificial Sequence
  Cyclic GFR-binding peptide
  MOD_RES (14)..(14): Xaa is C or S
FYLINIPSLRAPVX

SEQ ID NO: 10094 - protein, 22 aa, Artificial Sequence
  Cyclic GFR-binding peptide
  MOD_RES (16)..(17): Xaa is C or S
SDFYLVNIPSLKTPAXXAKPVA

SEQ ID NO: 10095 - protein, 25 aa, Artificial Sequence
  Cyclic GFR-binding peptide
  MOD_RES (7)..(7): Xaa is C or S
HVTKPTXAPTKLSPINVLYFDDSSN

SEQ ID NO: 10096 - protein, 25 aa, Artificial Sequence
  Cyclic GFR-binding peptide
  MOD_RES (6)..(7): Xaa is C or S
STPPTXXVPTRLSPINILYFDSANN

SEQ ID NO: 10097 - protein, 17 aa, Artificial Sequence
  Cyclic GFR-binding peptide
KLSPINVLYFDDSSNVI

SEQ ID NO: 10098 - protein, 27 aa, Artificial Sequence
  Cyclic GFR-binding peptide
  MOD_RES (6)..(7): Xaa is C or S
KVGKAXXVPTKLSPINVLYFDDMGVPT

SEQ ID NO: 10099 - protein, 16 aa, Artificial Sequence
  Cyclic GFR-binding peptide
LSPINMLYFDENEKVV

SEQ ID NO: 10100 - protein, 13 aa, Artificial Sequence
  Cyclic GFR-binding peptide
VPTRLSPINILYF

SEQ ID NO: 10101 - protein, 17 aa, Artificial Sequence
  Cyclic GFR-binding peptide
KTSPINMLYFDNGRVLL

SEQ ID NO: 10102 - protein, 25 aa, Artificial Sequence
  Cyclic GFR-binding peptide
  MOD_RES (6)..(7): Xaa is C or S
KASKAXXVPTKLSPINILYFDKGVV

SEQ ID NO: 10103 - protein, 17 aa, Artificial Sequence
  Cyclic GFR-binding peptide
  MOD_RES (3)..(4): Xaa is C or S
KAXXAPTKLSPINVLYF

SEQ ID NO: 10104 - protein, 15 aa, Artificial Sequence
  Cyclic GFR-binding peptide
  MOD_RES (1)..(2): Xaa is C or S
XXVPTELSPINMLYF

SEQ ID NO: 10105 - protein, 16 aa, Artificial Sequence
  Cyclic GFR-binding peptide
  MOD_RES (2)..(3): Xaa is C or S
TXXVPTRLSPINILYF

SEQ ID NO: 10106 - protein, 21 aa, Artificial Sequence
  Cyclic GFR-binding peptide
  MOD_RES (6)..(7): Xaa is C or S
SIPKAXXVPTELSPINMLYFD

SEQ ID NO: 10107 - protein, 27 aa, Artificial Sequence
  Cyclic GFR-binding peptide
  MOD_RES (6)..(7): Xaa is C or S
AAPASXXVPARLSPINILYFDAANNVV

SEQ ID NO: 10108 - protein, 22 aa, Artificial Sequence
  Cyclic GFR-binding peptide
  MOD_RES (6)..(7): Xaa is C or S
AAPASXXVPARLSPINILYFDA

SEQ ID NO: 10109 - protein, 24 aa, Artificial Sequence
  Cyclic GFR-binding peptide
  MOD_RES (6)..(7): Xaa is C or S
HVPKPXXAPTKLSPINVLYFDDSS

SEQ ID NO: 10110 - protein, 19 aa, Artificial Sequence
  Cyclic GFR-binding peptide
PTELSPINMLYFDENEKVV

SEQ ID NO: 10111 - protein, 27 aa, Artificial Sequence
  Cyclic GFR-binding peptide
  MOD_RES (6)..(7): Xaa is C or S
STPPTXXVPTRLSPINILYFDSANNVV

SEQ ID NO: 10112 - protein, 13 aa, Artificial Sequence
  Cyclic GFR-binding peptide
VPTKLSPINILYF

SEQ ID NO: 10113 - protein, 19 aa, Artificial Sequence
  Cyclic GFR-binding peptide
  MOD_RES (6)..(6): Xaa is C or S
VTKPTXAPTKLSPINVLYF

SEQ ID NO: 10114 - protein, 25 aa, Artificial Sequence
  Cyclic GFR-binding peptide
  MOD_RES (6)..(7): Xaa is C or S
AVPKAXXAPTKLSPINVLYFDSSNN

SEQ ID NO: 10115 - protein, 13 aa, Artificial Sequence
  Cyclic GFR-binding peptide
APTQLSPINVLYF

SEQ ID NO: 10116 - protein, 20 aa, Artificial Sequence
  Cyclic GFR-binding peptide
  MOD_RES (6)..(7): Xaa is C or S
TVPKPXXAPTQLSPINVLYF

SEQ ID NO: 10117 - protein, 23 aa, Artificial Sequence
  Cyclic GFR-binding peptide
  MOD_RES (6)..(7): Xaa is C or S
KASKAXXVPTKLSPINILYFDKG

SEQ ID NO: 10118 - protein, 20 aa, Artificial Sequence
  Cyclic GFR-binding peptide
  MOD_RES (6)..(7): Xaa is C or S
KVGKAXXVPTKLSPINVLYF

SEQ ID NO: 10119 - protein, 16 aa, Artificial Sequence
  Cyclic GFR-binding peptide
LSPINVLYFDDMGVPT

SEQ ID NO: 10120 - protein, 21 aa, Artificial Sequence
  Cyclic GFR-binding peptide
  MOD_RES (6)..(7): Xaa is C or S
RVPSTXXAPVKTSPINMLYFD

SEQ ID NO: 10121 - protein, 14 aa, Artificial Sequence
  Cyclic GFR-binding peptide
  MOD_RES (1)..(1): Xaa is C or S
XVPTKLSPINVLYF

SEQ ID NO: 10122 - protein, 22 aa, Artificial Sequence
  Cyclic GFR-binding peptide
  MOD_RES (7)..(7): Xaa is C or S
HVTKPTXAPTKLSPINVLYFDD

SEQ ID NO: 10123 - protein, 23 aa, Artificial Sequence
  Cyclic GFR-binding peptide
  MOD_RES (6)..(7): Xaa is C or S
YVPKPXXAPTKLSPINVLYFDDS

SEQ ID NO: 10124 - protein, 17 aa, Artificial Sequence
  Cyclic GFR-binding peptide
KLSPINVLYFDDMGVPT

SEQ ID NO: 10125 - protein, 18 aa, Artificial Sequence
  Cyclic GFR-binding peptide
  MOD_RES (5)..(5): Xaa is C or S
TKPTXAPTKLSPINVLYF

SEQ ID NO: 10126 - protein, 20 aa, Artificial Sequence
  Cyclic GFR-binding peptide
  MOD_RES (6)..(7): Xaa is C or S
KIPKAXXVPTELSPINMLYF

SEQ ID NO: 10127 - protein, 15 aa, Artificial Sequence
  Cyclic GFR-binding peptide
  MOD_RES (1)..(2): Xaa is C or S
XXVPARLSPINILYF

SEQ ID NO: 10128 - protein, 25 aa, Artificial Sequence
  Cyclic GFR-binding peptide
  MOD_RES (6)..(7): Xaa is C or S
KIPKAXXVPTELSPINMLYFDENEK

SEQ ID NO: 10129 - protein, 26 aa, Artificial Sequence
  Cyclic GFR-binding peptide
  MOD_RES (6)..(7): Xaa is C or S
KVGKAXXVPTKLSPINVLYFDDMGVP

SEQ ID NO: 10130 - protein, 24 aa, Artificial Sequence
  Cyclic GFR-binding peptide
  MOD_RES (6)..(7): Xaa is C or S
TVPKPXXAPTQLSPINVLYFDDSS

SEQ ID NO: 10131 - protein, 27 aa, Artificial Sequence
  Cyclic GFR-binding peptide
  MOD_RES (7)..(7): Xaa is C or S
HVTKPTXAPTKLSPINVLYFDDSSNVI

SEQ ID NO: 10132 - protein, 17 aa, Artificial Sequence
  Cyclic GFR-binding peptide
  MOD_RES (3)..(4): Xaa is C or S
KPXXAPTQLSPINVLYF

SEQ ID NO: 10133 - protein, 15 aa, Artificial Sequence
  Cyclic GFR-binding peptide
SPINMLYFDNGRVLL

SEQ ID NO: 10134 - protein, 23 aa, Artificial Sequence
  Cyclic GFR-binding peptide
  MOD_RES (6)..(7): Xaa is C or S
HVPKPXXAPTKLSPINVLYFDDS

SEQ ID NO: 10135 - protein, 27 aa, Artificial Sequence
  Cyclic GFR-binding peptide
  MOD_RES (6)..(7): Xaa is C or S
KIPKAXXVPTELSPINMLYFDENEKVV

SEQ ID NO: 10136 - protein, 18 aa, Artificial Sequence
  Cyclic GFR-binding peptide
  MOD_RES (4)..(5): Xaa is C or S
PSTXXAPVKTSPINMLYF

SEQ ID NO: 10137 - protein, 15 aa, Artificial Sequence
  Cyclic GFR-binding peptide
SPINILYFDKGVVTY

SEQ ID NO: 10138 - protein, 18 aa, Artificial Sequence
  Cyclic GFR-binding peptide
  MOD_RES (4)..(5): Xaa is C or S
PPTXXVPTRLSPINILYF

SEQ ID NO: 10139 - protein, 18 aa, Artificial Sequence
  Cyclic GFR-binding peptide
  MOD_RES (4)..(5): Xaa is C or S
PKPXXAPTQLSPINVLYF

SEQ ID NO: 10140 - protein, 16 aa, Artificial Sequence
  Cyclic GFR-binding peptide
  MOD_RES (2)..(3): Xaa is C or S
AXXAPTKLSPINVLYF

SEQ ID NO: 10141 - protein, 26 aa, Artificial Sequence
  Cyclic GFR-binding peptide
  MOD_RES (6)..(7): Xaa is C or S
TVPKPXXAPTQLSPINVLYFDDSSNV

SEQ ID NO: 10142 - protein, 18 aa, Artificial Sequence
  Cyclic GFR-binding peptide
ARLSPINILYFDAANNVV

SEQ ID NO: 10143 - protein, 22 aa, Artificial Sequence
  Cyclic GFR-binding peptide
  MOD_RES (6)..(7): Xaa is C or S
YVPKPXXAPTKLSPINVLYFDD

SEQ ID NO: 10144 - protein, 24 aa, Artificial Sequence
  Cyclic GFR-binding peptide
  MOD_RES (6)..(7): Xaa is C or S
YVPKPXXAPTKLSPINVLYFDDSS

SEQ ID NO: 10145 - protein, 13 aa, Artificial Sequence
  Cyclic GFR-binding peptide
VPARLSPINILYF

SEQ ID NO: 10146 - protein, 19 aa, Artificial Sequence
  Cyclic GFR-binding peptide
PVKTSPINMLYFDNGRVLL

SEQ ID NO: 10147 - protein, 17 aa, Artificial Sequence
  Cyclic GFR-binding peptide
ELSPINMLYFDENEKVV

SEQ ID NO: 10148 - protein, 20 aa, Artificial Sequence
  Cyclic GFR-binding peptide
  MOD_RES (6)..(7): Xaa is C or S
HVPKPXXAPTKLSPINVLYF

SEQ ID NO: 10149 - protein, 15 aa, Artificial Sequence
  Cyclic GFR-binding peptide
  MOD_RES (1)..(2): Xaa is C or S
XXVPTRLSPINILYF

SEQ ID NO: 10150 - protein, 22 aa, Artificial Sequence
  Cyclic GFR-binding peptide
  MOD_RES (6)..(7): Xaa is C or S
KIPKAXXVPTELSPINMLYFDE

SEQ ID NO: 10151 - protein, 16 aa, Artificial Sequence
  Cyclic GFR-binding peptide
LSPINVLYFDSSNNVI

SEQ ID NO: 10152 - protein, 15 aa, Artificial Sequence
  Cyclic GFR-binding peptide
SPINVLYFDSSNNVI

SEQ ID NO: 10153 - protein, 16 aa, Artificial Sequence
  Cyclic GFR-binding peptide
  MOD_RES (3)..(3): Xaa is C or S
PTXAPTKLSPINVLYF

SEQ ID NO: 10154 - protein, 26 aa, Artificial Sequence
  Cyclic GFR-binding peptide
  MOD_RES (6)..(7): Xaa is C or S
YVPKPXXAPTKLSPINVLYFDDSSNV

SEQ ID NO: 10155 - protein, 21 aa, Artificial Sequence
  Cyclic GFR-binding peptide
  MOD_RES (6)..(7): Xaa is C or S
KIPKAXXVPTELSPINMLYFD

SEQ ID NO: 10156 - protein, 23 aa, Artificial Sequence
  Cyclic GFR-binding peptide
  MOD_RES (6)..(7): Xaa is C or S
TVPKPXXAPTQLSPINVLYFDDS

SEQ ID NO: 10157 - protein, 25 aa, Artificial Sequence
  Cyclic GFR-binding peptide
  MOD_RES (6)..(7): Xaa is C or S
YVPKPXXAPTKLSPINVLYFDDSSN

SEQ ID NO: 10158 - protein, 17 aa, Artificial Sequence
  Cyclic GFR-binding peptide
  MOD_RES (3)..(4): Xaa is C or S
KAXXVPTELSPINMLYF

SEQ ID NO: 10159 - protein, 23 aa, Artificial Sequence
  Cyclic GFR-binding peptide
  MOD_RES (6)..(7): Xaa is C or S
AAPASXXVPARLSPINILYFDAA

SEQ ID NO: 10160 - protein, 15 aa, Artificial Sequence
  Cyclic GFR-binding peptide
  MOD_RES (1)..(2): Xaa is C or S
XXVPTKLSPINILYF

SEQ ID NO: 10161 - protein, 22 aa, Artificial Sequence
  Cyclic GFR-binding peptide
  MOD_RES (6)..(7): Xaa is C or S
KVGKAXXVPTKLSPINVLYFDD

SEQ ID NO: 10162 - protein, 18 aa, Artificial Sequence
  Cyclic GFR-binding peptide
  MOD_RES (4)..(5): Xaa is C or S
GKAXXVPTKLSPINVLYF

SEQ ID NO: 10163 - protein, 19 aa, Artificial Sequence
  Cyclic GFR-binding peptide
  MOD_RES (5)..(6): Xaa is C or S
VPSTXXAPVKTSPINMLYF

SEQ ID NO: 10164 - protein, 15 aa, Artificial Sequence
  Cyclic GFR-binding peptide
  MOD_RES (1)..(2): Xaa is C or S
XXAPTQLSPINVLYF

SEQ ID NO: 10165 - protein, 19 aa, Artificial Sequence
  Cyclic GFR-binding peptide
PARLSPINILYFDAANNVV

SEQ ID NO: 10166 - protein, 24 aa, Artificial Sequence
  Cyclic GFR-binding peptide
  MOD_RES (6)..(7): Xaa is C or S
KASKAXXVPTKLSPINILYFDKGV

SEQ ID NO: 10167 - protein, 18 aa, Artificial Sequence
  Cyclic GFR-binding peptide
TKLSPINVLYFDSSNNVI

SEQ ID NO: 10168 - protein, 20 aa, Artificial Sequence
  Cyclic GFR-binding peptide
  MOD_RES (6)..(7): Xaa is C or S
YVPKPXXAPTKLSPINVLYF

SEQ ID NO: 10169 - protein, 24 aa, Artificial Sequence
  Cyclic GFR-binding peptide
  MOD_RES (6)..(7): Xaa is C or S
AVPKAXXAPTKLSPINVLYFDSSN

SEQ ID NO: 10170 - protein, 18 aa, Artificial Sequence
  Cyclic GFR-binding peptide
  MOD_RES (4)..(5): Xaa is C or S
PASXXVPARLSPINILYF

SEQ ID NO: 10171 - protein, 26 aa, Artificial Sequence
  Cyclic GFR-binding peptide
  MOD_RES (6)..(7): Xaa is C or S
STPPTXXVPTRLSPINILYFDSANNV

SEQ ID NO: 10172 - protein, 22 aa, Artificial Sequence
  Cyclic GFR-binding peptide
  MOD_RES (6)..(7): Xaa is C or S
TVPKPXXAPTQLSPINVLYFDD

SEQ ID NO: 10173 - protein, 14 aa, Artificial Sequence
  Cyclic GFR-binding peptide
  MOD_RES (1)..(1): Xaa is C or S
XAPVKTSPINMLYF

SEQ ID NO: 10174 - protein, 26 aa, Artificial Sequence
  Cyclic GFR-binding peptide
  MOD_RES (6)..(7): Xaa is C or S
KASKAXXVPTKLSPINILYFDKGVVT

SEQ ID NO: 10175 - protein, 23 aa, Artificial Sequence
  Cyclic GFR-binding peptide
  MOD_RES (6)..(7): Xaa is C or S
RVPSTXXAPVKTSPINMLYFDNG

SEQ ID NO: 10176 - protein, 26 aa, Artificial Sequence
  Cyclic GFR-binding peptide
  MOD_RES (6)..(7): Xaa is C or S
AAPASXXVPARLSPINILYFDAANNV

SEQ ID NO: 10177 - protein, 21 aa, Artificial Sequence
  Cyclic GFR-binding peptide
  MOD_RES (7)..(7): Xaa is C or S
HVTKPTXAPTKLSPINVLYFD

SEQ ID NO: 10178 - protein, 26 aa, Artificial Sequence
  Cyclic GFR-binding peptide
  MOD_RES (6)..(7): Xaa is C or S
RVPSTXXAPVKTSPINMLYFDNGRVL

SEQ ID NO: 10179 - protein, 25 aa, Artificial Sequence
  Cyclic GFR-binding peptide
  MOD_RES (6)..(7): Xaa is C or S
TVPKPXXAPTQLSPINVLYFDDSSN

SEQ ID NO: 10180 - protein, 18 aa, Artificial Sequence
  Cyclic GFR-binding peptide
VKTSPINMLYFDNGRVLL

SEQ ID NO: 10181 - protein, 23 aa, Artificial Sequence
  Cyclic GFR-binding peptide
  MOD_RES (6)..(7): Xaa is C or S
STPPTXXVPTRLSPINILYFDSA

SEQ ID NO: 10182 - protein, 17 aa, Artificial Sequence
  Cyclic GFR-binding peptide
KLSPINILYFDKGVVTY

SEQ ID NO: 10183 - protein, 25 aa, Artificial Sequence
  Cyclic GFR-binding peptide
  MOD_RES (6)..(7): Xaa is C or S
RVPSTXXAPVKTSPINMLYFDNGRV

SEQ ID NO: 10184 - protein, 18 aa, Artificial Sequence
  Cyclic GFR-binding peptide
TKLSPINILYFDKGVVTY

SEQ ID NO: 10185 - protein, 17 aa, Artificial Sequence
  Cyclic GFR-binding peptide
  MOD_RES (3)..(4): Xaa is C or S
ASXXVPARLSPINILYF

SEQ ID NO: 10186 - protein, 17 aa, Artificial Sequence
  Cyclic GFR-binding peptide
KLSPINVLYFDSSNNVI

SEQ ID NO: 10187 - protein, 14 aa, Artificial Sequence
  Cyclic GFR-binding peptide
  MOD_RES (1)..(1): Xaa is C or S
XAPTKLSPINVLYF

SEQ ID NO: 10188 - protein, 16 aa, Artificial Sequence
  Cyclic GFR-binding peptide
LSPINILYFDKGVVTY

SEQ ID NO: 10189 - protein, 24 aa, Artificial Sequence
  Cyclic GFR-binding peptide
  MOD_RES (6)..(7): Xaa is C or S
AAPASXXVPARLSPINILYFDAAN

SEQ ID NO: 10190 - protein, 20 aa, Artificial Sequence
  Cyclic GFR-binding peptide
  MOD_RES (6)..(7): Xaa is C or S
AVPKAXXAPTKLSPINVLYF

SEQ ID NO: 10191 - protein, 19 aa, Artificial Sequence
  Cyclic GFR-binding peptide
  MOD_RES (5)..(6): Xaa is C or S
TPPTXXVPTRLSPINILYF

SEQ ID NO: 10192 - protein, 19 aa, Artificial Sequence
  Cyclic GFR-binding peptide
PTKLSPINVLYFDDMGVPT

SEQ ID NO: 10193 - protein, 27 aa, Artificial Sequence
  Cyclic GFR-binding peptide
  MOD_RES (6)..(7): Xaa is C or S
YVPKPXXAPTKLSPINVLYFDDSSNVI

SEQ ID NO: 10194 - protein, 19 aa, Artificial Sequence
  Cyclic GFR-binding peptide
  MOD_RES (5)..(6): Xaa is C or S
VPKPXXAPTKLSPINVLYF

SEQ ID NO: 10195 - protein, 19 aa, Artificial Sequence
  Cyclic GFR-binding peptide
  MOD_RES (5)..(6): Xaa is C or S
ASKAXXVPTKLSPINILYF

SEQ ID NO: 10196 - protein, 17 aa, Artificial Sequence
  Cyclic GFR-binding peptide
  MOD_RES (3)..(4): Xaa is C or S
KAXXVPTKLSPINVLYF

SEQ ID NO: 10197 - protein, 20 aa, Artificial Sequence
  Cyclic GFR-binding peptide
  MOD_RES (6)..(7): Xaa is C or S
RVPSTXXAPVKTSPINMLYF

SEQ ID NO: 10198 - protein, 22 aa, Artificial Sequence
  Cyclic GFR-binding peptide
  MOD_RES (6)..(7): Xaa is C or S
STPPTXXVPTRLSPINILYFDS

SEQ ID NO: 10199 - protein, 21 aa, Artificial Sequence
  Cyclic GFR-binding peptide
  MOD_RES (6)..(7): Xaa is C or S
TVPKPXXAPTQLSPINVLYFD

SEQ ID NO: 10200 - protein, 16 aa, Artificial Sequence
  Cyclic GFR-binding peptide
  MOD_RES (2)..(3): Xaa is C or S
AXXVPTELSPINMLYF

SEQ ID NO: 10201 - protein, 26 aa, Artificial Sequence
  Cyclic GFR-binding peptide
  MOD_RES (6)..(7): Xaa is C or S
SIPKAXXVPTELSPINMLYFDEYDKV

SEQ ID NO: 10202 - protein, 25 aa, Artificial Sequence
  Cyclic GFR-binding peptide
  MOD_RES (6)..(7): Xaa is C or S
HVPKPXXAPTKLSPINVLYFDDSSN

SEQ ID NO: 10203 - protein, 25 aa, Artificial Sequence
  Cyclic GFR-binding peptide
  MOD_RES (6)..(7): Xaa is C or S
SIPKAXXVPTELSPINMLYFDEYDK

SEQ ID NO: 10204 - protein, 13 aa, Artificial Sequence
  Cyclic GFR-binding peptide
APTKLSPINVLYF

SEQ ID NO: 10205 - protein, 26 aa, Artificial Sequence
  Cyclic GFR-binding peptide
  MOD_RES (6)..(7): Xaa is C or S
HVPKPXXAPTKLSPINVLYFDDSSNV

SEQ ID NO: 10206 - protein, 21 aa, Artificial Sequence
  Cyclic GFR-binding peptide
  MOD_RES (6)..(7): Xaa is C or S
STPPTXXVPTRLSPINILYFD

SEQ ID NO: 10207 - protein, 14 aa, Artificial Sequence
  Cyclic GFR-binding peptide
  MOD_RES (1)..(1): Xaa is C or S
XVPTKLSPINILYF

SEQ ID NO: 10208 - protein, 27 aa, Artificial Sequence
  Cyclic GFR-binding peptide
  MOD_RES (6)..(7): Xaa is C or S
AVPKAXXAPTKLSPINVLYFDSSNNVI

SEQ ID NO: 10209 - protein, 16 aa, Artificial Sequence
  Cyclic GFR-binding peptide
  MOD_RES (2)..(3): Xaa is C or S
SXXVPARLSPINILYF

SEQ ID NO: 10210 - protein, 15 aa, Artificial Sequence
  Cyclic GFR-binding peptide
  MOD_RES (1)..(2): Xaa is C or S
XXAPVKTSPINMLYF

SEQ ID NO: 10211 - protein, 21 aa, Artificial Sequence
  Cyclic GFR-binding peptide
  MOD_RES (6)..(7): Xaa is C or S
AAPASXXVPARLSPINILYFD

SEQ ID NO: 10212 - protein, 14 aa, Artificial Sequence
  Cyclic GFR-binding peptide
  MOD_RES (1)..(1): Xaa is C or S
XAPTQLSPINVLYF

SEQ ID NO: 10213 - protein, 27 aa, Artificial Sequence
  Cyclic GFR-binding peptide
  MOD_RES (6)..(7): Xaa is C or S
KASKAXXVPTKLSPINILYFDKGVVTY

SEQ ID NO: 10214 - protein, 19 aa, Artificial Sequence
  Cyclic GFR-binding peptide
  MOD_RES (5)..(6): Xaa is C or S
IPKAXXVPTELSPINMLYF

SEQ ID NO: 10215 - protein, 27 aa, Artificial Sequence
  Cyclic GFR-binding peptide
  MOD_RES (6)..(7): Xaa is C or S
SIPKAXXVPTELSPINMLYFDEYDKVV

SEQ ID NO: 10216 - protein, 21 aa, Artificial Sequence
  Cyclic GFR-binding peptide
  MOD_RES (6)..(7): Xaa is C or S
KVGKAXXVPTKLSPINVLYFD

SEQ ID NO: 10217 - protein, 23 aa, Artificial Sequence
  Cyclic GFR-binding peptide
  MOD_RES (7)..(7): Xaa is C or S
HVTKPTXAPTKLSPINVLYFDDS

SEQ ID NO: 10218 - protein, 20 aa, Artificial Sequence
  Cyclic GFR-binding peptide
  MOD_RES (6)..(7): Xaa is C or S
AAPASXXVPARLSPINILYF

SEQ ID NO: 10219 - protein, 13 aa, Artificial Sequence
  Cyclic GFR-binding peptide
VPTKLSPINVLYF

SEQ ID NO: 10220 - protein, 18 aa, Artificial Sequence
  Cyclic GFR-binding peptide
TELSPINMLYFDENEKVV

SEQ ID NO: 10221 - protein, 26 aa, Artificial Sequence
  Cyclic GFR-binding peptide
  MOD_RES (6)..(7): Xaa is C or S
AVPKAXXAPTKLSPINVLYFDSSNNV

SEQ ID NO: 10222 - protein, 15 aa, Artificial Sequence
  Cyclic GFR-binding peptide
SPINVLYFDDMGVPT

SEQ ID NO: 10223 - protein, 17 aa, Artificial Sequence
  Cyclic GFR-binding peptide
RLSPINILYFDSANNVV

SEQ ID NO: 10224 - protein, 14 aa, Artificial Sequence
  Cyclic GFR-binding peptide
  MOD_RES (1)..(1): Xaa is C or S
XVPTRLSPINILYF

SEQ ID NO: 10225 - protein, 17 aa, Artificial Sequence
  Cyclic GFR-binding peptide
  MOD_RES (4)..(4): Xaa is C or S
KPTXAPTKLSPINVLYF

SEQ ID NO: 10226 - protein, 20 aa, Artificial Sequence
  Cyclic GFR-binding peptide
  MOD_RES (6)..(7): Xaa is C or S
KASKAXXVPTKLSPINILYF

SEQ ID NO: 10227 - protein, 20 aa, Artificial Sequence
  Cyclic GFR-binding peptide
  MOD_RES (6)..(7): Xaa is C or S
SIPKAXXVPTELSPINMLYF

SEQ ID NO: 10228 - protein, 17 aa, Artificial Sequence
  Cyclic GFR-binding peptide
  MOD_RES (3)..(4): Xaa is C or S
PTXXVPTRLSPINILYF

SEQ ID NO: 10229 - protein, 16 aa, Artificial Sequence
  Cyclic GFR-binding peptide
  MOD_RES (2)..(3): Xaa is C or S
TXXAPVKTSPINMLYF

SEQ ID NO: 10230 - protein, 15 aa, Artificial Sequence
  Cyclic GFR-binding peptide
SPINMLYFDEYDKVV

SEQ ID NO: 10231 - protein, 18 aa, Artificial Sequence
  Cyclic GFR-binding peptide
  MOD_RES (4)..(5): Xaa is C or S
PKAXXVPTELSPINMLYF

SEQ ID NO: 10232 - protein, 16 aa, Artificial Sequence
  Cyclic GFR-binding peptide
LSPINILYFDAANNVV

SEQ ID NO: 10233 - protein, 16 aa, Artificial Sequence
  Cyclic GFR-binding peptide
  MOD_RES (2)..(3): Xaa is C or S
PXXAPTKLSPINVLYF

SEQ ID NO: 10234 - protein, 15 aa, Artificial Sequence
  Cyclic GFR-binding peptide
SPINMLYFDENEKVV

SEQ ID NO: 10235 - protein, 19 aa, Artificial Sequence
  Cyclic GFR-binding peptide
  MOD_RES (5)..(6): Xaa is C or S
VPKAXXAPTKLSPINVLYF

SEQ ID NO: 10236 - protein, 13 aa, Artificial Sequence
  Cyclic GFR-binding peptide
APVKTSPINMLYF

SEQ ID NO: 10237 - protein, 24 aa, Artificial Sequence
  Cyclic GFR-binding peptide
  MOD_RES (6)..(7): Xaa is C or S
RVPSTXXAPVKTSPINMLYFDNGR

SEQ ID NO: 10238 - protein, 19 aa, Artificial Sequence
  Cyclic GFR-binding peptide
PTKLSPINILYFDKGVVTY

SEQ ID NO: 10239 - protein, 24 aa, Artificial Sequence
  Cyclic GFR-binding peptide
  MOD_RES (6)..(7): Xaa is C or S
SIPKAXXVPTELSPINMLYFDEYD

SEQ ID NO: 10240 - protein, 18 aa, Artificial Sequence
  Cyclic GFR-binding peptide
TKLSPINVLYFDDMGVPT

SEQ ID NO: 10241 - protein, 16 aa, Artificial Sequence
  Cyclic GFR-binding peptide
TSPINMLYFDNGRVLL

SEQ ID NO: 10242 - protein, 19 aa, Artificial Sequence
  Cyclic GFR-binding peptide
PTKLSPINVLYFDSSNNVI

SEQ ID NO: 10243 - protein, 23 aa, Artificial Sequence
  Cyclic GFR-binding peptide
  MOD_RES (6)..(7): Xaa is C or S
SIPKAXXVPTELSPINMLYFDEY

SEQ ID NO: 10244 - protein, 19 aa, Artificial Sequence
  Cyclic GFR-binding peptide
PTKLSPINVLYFDDSSNVI

SEQ ID NO: 10245 - protein, 14 aa, Artificial Sequence
  Cyclic GFR-binding peptide
  MOD_RES (1)..(1): Xaa is C or S
XVPTELSPINMLYF

SEQ ID NO: 10246 - protein, 19 aa, Artificial Sequence
  Cyclic GFR-binding peptide
  MOD_RES (5)..(6): Xaa is C or S
VPKPXXAPTQLSPINVLYF

SEQ ID NO: 10247 - protein, 16 aa, Artificial Sequence
  Cyclic GFR-binding peptide
LSPINILYFDSANNVV

SEQ ID NO: 10248 - protein, 16 aa, Artificial Sequence
  Cyclic GFR-binding peptide
  MOD_RES (2)..(3): Xaa is C or S
AXXVPTKLSPINVLYF

SEQ ID NO: 10249 - protein, 19 aa, Artificial Sequence
  Cyclic GFR-binding peptide
PTQLSPINVLYFDDSSNVI

SEQ ID NO: 10250 - protein, 24 aa, Artificial Sequence
  Cyclic GFR-binding peptide
  MOD_RES (6)..(7): Xaa is C or S
KIPKAXXVPTELSPINMLYFDENE

SEQ ID NO: 10251 - protein, 18 aa, Artificial Sequence
  Cyclic GFR-binding peptide
  MOD_RES (4)..(5): Xaa is C or S
PKPXXAPTKLSPINVLYF

SEQ ID NO: 10252 - protein, 25 aa, Artificial Sequence
  Cyclic GFR-binding peptide
  MOD_RES (6)..(7): Xaa is C or S
AAPASXXVPARLSPINILYFDAANN

SEQ ID NO: 10253 - protein, 19 aa, Artificial Sequence
  Cyclic GFR-binding peptide
PTELSPINMLYFDEYDKVV

SEQ ID NO: 10254 - protein, 19 aa, Artificial Sequence
  Cyclic GFR-binding peptide
PTRLSPINILYFDSANNVV

SEQ ID NO: 10255 - protein, 23 aa, Artificial Sequence
  Cyclic GFR-binding peptide
  MOD_RES (6)..(7): Xaa is C or S
KVGKAXXVPTKLSPINVLYFDDM

SEQ ID NO: 10256 - protein, 18 aa, Artificial Sequence
  Cyclic GFR-binding peptide
  MOD_RES (4)..(5): Xaa is C or S
SKAXXVPTKLSPINILYF

SEQ ID NO: 10257 - protein, 13 aa, Artificial Sequence
  Cyclic GFR-binding peptide
VPTELSPINMLYF

SEQ ID NO: 10258 - protein, 24 aa, Artificial Sequence
  Cyclic GFR-binding peptide
  MOD_RES (6)..(7): Xaa is C or S
STPPTXXVPTRLSPINILYFDSAN

SEQ ID NO: 10259 - protein, 16 aa, Artificial Sequence
  Cyclic GFR-binding peptide
  MOD_RES (2)..(3): Xaa is C or S
AXXVPTKLSPINILYF

SEQ ID NO: 10260 - protein, 22 aa, Artificial Sequence
  Cyclic GFR-binding peptide
  MOD_RES (6)..(7): Xaa is C or S
SIPKAXXVPTELSPINMLYFDE

SEQ ID NO: 10261 - protein, 16 aa, Artificial Sequence
  Cyclic GFR-binding peptide
LSPINVLYFDDSSNVI

SEQ ID NO: 10262 - protein, 21 aa, Artificial Sequence
  Cyclic GFR-binding peptide
  MOD_RES (6)..(7): Xaa is C or S
YVPKPXXAPTKLSPINVLYFD

SEQ ID NO: 10263 - protein, 15 aa, Artificial Sequence
  Cyclic GFR-binding peptide
  MOD_RES (1)..(2): Xaa is C or S
XXVPTKLSPINVLYF

SEQ ID NO: 10264 - protein, 23 aa, Artificial Sequence
  Cyclic GFR-binding peptide
  MOD_RES (6)..(7): Xaa is C or S
AVPKAXXAPTKLSPINVLYFDSS

SEQ ID NO: 10265 - protein, 15 aa, Artificial Sequence
  Cyclic GFR-binding peptide
SPINVLYFDDSSNVI

SEQ ID NO: 10266 - protein, 15 aa, Artificial Sequence
  Cyclic GFR-binding peptide
  MOD_RES (1)..(2): Xaa is C or S
XXAPTKLSPINVLYF

SEQ ID NO: 10267 - protein, 26 aa, Artificial Sequence
  Cyclic GFR-binding peptide
  MOD_RES (7)..(7): Xaa is C or S
HVTKPTXAPTKLSPINVLYFDDSSNV

SEQ ID NO: 10268 - protein, 17 aa, Artificial Sequence
  Cyclic GFR-binding peptide
RLSPINILYFDAANNVV

SEQ ID NO: 10269 - protein, 21 aa, Artificial Sequence
  Cyclic GFR-binding peptide
  MOD_RES (6)..(7): Xaa is C or S
AVPKAXXAPTKLSPINVLYFD

SEQ ID NO: 10270 - skipped

SEQ ID NO: 10271 - protein, 21 aa, Artificial Sequence
  Cyclic GFR-binding peptide
  MOD_RES (6)..(7): Xaa is C or S
HVPKPXXAPTKLSPINVLYFD

SEQ ID NO: 10272 - protein, 18 aa, Artificial Sequence
  Cyclic GFR-binding peptide
TRLSPINILYFDSANNVV

SEQ ID NO: 10273 - protein, 17 aa, Artificial Sequence
  Cyclic GFR-binding peptide
  MOD_RES (3)..(4): Xaa is C or S
STXXAPVKTSPINMLYF

SEQ ID NO: 10274 - protein, 15 aa, Artificial Sequence
  Cyclic GFR-binding peptide
  MOD_RES (2)..(2): Xaa is C or S
TXAPTKLSPINVLYF

SEQ ID NO: 10275 - protein, 27 aa, Artificial Sequence
  Cyclic GFR-binding peptide
  MOD_RES (6)..(7): Xaa is C or S
HVPKPXXAPTKLSPINVLYFDDSSNVI

SEQ ID NO: 10276 - protein, 26 aa, Artificial Sequence
  Cyclic GFR-binding peptide
  MOD_RES (6)..(7): Xaa is C or S
KIPKAXXVPTELSPINMLYFDENEKV

SEQ ID NO: 10277 - protein, 23 aa, Artificial Sequence
  Cyclic GFR-binding peptide
  MOD_RES (6)..(7): Xaa is C or S
KIPKAXXVPTELSPINMLYFDEN

SEQ ID NO: 10278 - protein, 16 aa, Artificial Sequence
  Cyclic GFR-binding peptide
  MOD_RES (2)..(3): Xaa is C or S
PXXAPTQLSPINVLYF

SEQ ID NO: 10279 - protein, 24 aa, Artificial Sequence
  Cyclic GFR-binding peptide
  MOD_RES (6)..(7): Xaa is C or S
KVGKAXXVPTKLSPINVLYFDDMG

SEQ ID NO: 10280 - protein, 22 aa, Artificial Sequence
  Cyclic GFR-binding peptide
  MOD_RES (6)..(7): Xaa is C or S
KASKAXXVPTKLSPINILYFDK

SEQ ID NO: 10281 - protein, 18 aa, Artificial Sequence
  Cyclic GFR-binding peptide
  MOD_RES (4)..(5): Xaa is C or S
PKAXXAPTKLSPINVLYF

SEQ ID NO: 10282 - protein, 19 aa, Artificial Sequence
  Cyclic GFR-binding peptide
  MOD_RES (5)..(6): Xaa is C or S
APASXXVPARLSPINILYF

SEQ ID NO: 10283 - protein, 25 aa, Artificial Sequence
  Cyclic GFR-binding peptide
  MOD_RES (6)..(7): Xaa is C or S
KVGKAXXVPTKLSPINVLYFDDMGV

SEQ ID NO: 10284 - protein, 24 aa, Artificial Sequence
  Cyclic GFR-binding peptide
  MOD_RES (7)..(7): Xaa is C or S
HVTKPTXAPTKLSPINVLYFDDSS

SEQ ID NO: 10285 - protein, 17 aa, Artificial Sequence
  Cyclic GFR-binding peptide
  MOD_RES (3)..(4): Xaa is C or S
KAXXVPTKLSPINILYF

SEQ ID NO: 10286 - protein, 16 aa, Artificial Sequence
  Cyclic GFR-binding peptide
LSPINMLYFDEYDKVV

SEQ ID NO: 10287 - protein, 22 aa, Artificial Sequence
  Cyclic GFR-binding peptide
  MOD_RES (6)..(7): Xaa is C or S
HVPKPXXAPTKLSPINVLYFDD

SEQ ID NO: 10288 - protein, 17 aa, Artificial Sequence
  Cyclic GFR-binding peptide
QLSPINVLYFDDSSNVI

SEQ ID NO: 10289 - protein, 17 aa, Artificial Sequence
  Cyclic GFR-binding peptide
  MOD_RES (3)..(4): Xaa is C or S
KPXXAPTKLSPINVLYF

SEQ ID NO: 10290 - protein, 27 aa, Artificial Sequence
  Cyclic GFR-binding peptide
  MOD_RES (6)..(7): Xaa is C or S
TVPKPXXAPTQLSPINVLYFDDSSNVI

SEQ ID NO: 10291 - protein, 20 aa, Artificial Sequence
  Cyclic GFR-binding peptide
  MOD_RES (6)..(7): Xaa is C or S
STPPTXXVPTRLSPINILYF

SEQ ID NO: 10292 - protein, 27 aa, Artificial Sequence
  Cyclic GFR-binding peptide
  MOD_RES (6)..(7): Xaa is C or S
RVPSTXXAPVKTSPINMLYFDNGRVLL

SEQ ID NO: 10293 - protein, 17 aa, Artificial Sequence
  Cyclic GFR-binding peptide
ELSPINMLYFDEYDKVV

SEQ ID NO: 10294 - protein, 21 aa, Artificial Sequence
  Cyclic GFR-binding peptide
  MOD_RES (6)..(7): Xaa is C or S
KASKAXXVPTKLSPINILYFD

SEQ ID NO: 10295 - protein, 19 aa, Artificial Sequence
  Cyclic GFR-binding peptide
  MOD_RES (5)..(6): Xaa is C or S
VGKAXXVPTKLSPINVLYF

SEQ ID NO: 10296 - protein, 18 aa, Artificial Sequence
  Cyclic GFR-binding peptide
TQLSPINVLYFDDSSNVI

SEQ ID NO: 10297 - protein, 15 aa, Artificial Sequence
  Cyclic GFR-binding peptide
SPINILYFDAANNVV

SEQ ID NO: 10298 - protein, 18 aa, Artificial Sequence
  Cyclic GFR-binding peptide
TKLSPINVLYFDDSSNVI

SEQ ID NO: 10299 - protein, 18 aa, Artificial Sequence
  Cyclic GFR-binding peptide
TELSPINMLYFDEYDKVV

SEQ ID NO: 10300 - protein, 15 aa, Artificial Sequence
  Cyclic GFR-binding peptide
SPINILYFDSANNVV

SEQ ID NO: 10301 - protein, 20 aa, Artificial Sequence
  Cyclic GFR-binding peptide
  MOD_RES (7)..(7): Xaa is C or S
HVTKPTXAPTKLSPINVLYF

SEQ ID NO: 10302 - protein, 22 aa, Artificial Sequence
  Cyclic GFR-binding peptide
  MOD_RES (6)..(7): Xaa is C or S
RVPSTXXAPVKTSPINMLYFDN

SEQ ID NO: 10303 - protein, 14 aa, Artificial Sequence
  Cyclic GFR-binding peptide
  MOD_RES (1)..(1): Xaa is C or S
XVPARLSPINILYF

SEQ ID NO: 10304 - protein, 22 aa, Artificial Sequence
  Cyclic GFR-binding peptide
  MOD_RES (6)..(7): Xaa is C or S
AVPKAXXAPTKLSPINVLYFDS

SEQ ID NO: 10305 - protein, 25 aa, Artificial Sequence
  Cyclic GFR-binding peptide
  MOD_RES (19)..(20): Xaa is C or S
VRGNDIYLMSIPSTKVPAXXTSPVR

SEQ ID NO: 10306 - protein, 20 aa, Artificial Sequence
  Cyclic GFR-binding peptide
  MOD_RES (14)..(15): Xaa is C or S
IYLMSIPSMKTPTXXPGASG

SEQ ID NO: 10307 - protein, 23 aa, Artificial Sequence
  Cyclic GFR-binding peptide
  MOD_RES (17)..(18): Xaa is C or S
KDNIYLMSIPSMKTPTXXPGASG

SEQ ID NO: 10308 - protein, 15 aa, Artificial Sequence
  Cyclic GFR-binding peptide
  MOD_RES (14)..(15): Xaa is C or S
IYLMSIPSTKVPAXX

SEQ ID NO: 10309 - protein, 23 aa, Artificial Sequence
  Cyclic GFR-binding peptide
  MOD_RES (17)..(18): Xaa is C or S
SDDIYLVSIPSLKTPAXXPKPVH

SEQ ID NO: 10310 - protein, 19 aa, Artificial Sequence
  Cyclic GFR-binding peptide
VVNNASDIYLISIPSLRTP

SEQ ID NO: 10311 - protein, 25 aa, Artificial Sequence
  Cyclic GFR-binding peptide
  MOD_RES (19)..(20): Xaa is C or S
QQKDNIYLMSIPSMKTPTXXPGASG

SEQ ID NO: 10312 - protein, 21 aa, Artificial Sequence
  Cyclic GFR-binding peptide
  MOD_RES (15)..(16): Xaa is C or S
DIYLISIPSLRTPVXXTPPTS

SEQ ID NO: 10313 - protein, 17 aa, Artificial Sequence
  Cyclic GFR-binding peptide
  MOD_RES (14)..(15): Xaa is C or S
IYLMSIPSMKTPTXXPG

SEQ ID NO: 10314 - protein, 14 aa, Artificial Sequence
  Cyclic GFR-binding peptide
  MOD_RES (14)..(14): Xaa is C or S
IYLMSIPSTKVPAX

SEQ ID NO: 10315 - protein, 19 aa, Artificial Sequence
  Cyclic GFR-binding peptide
  MOD_RES (14)..(15): Xaa is C or S
IYLISIPSLRTPVXXTPPT

SEQ ID NO: 10316 - protein, 17 aa, Artificial Sequence
  Cyclic GFR-binding peptide
LLVRGNDIYLMSIPSTK

SEQ ID NO: 10317 - protein, 27 aa, Artificial Sequence
  Cyclic GFR-binding peptide
  MOD_RES (21)..(22): Xaa is C or S
VVNNASDIYLISIPSLRTPVXXTPPTS

SEQ ID NO: 10318 - protein, 20 aa, Artificial Sequence
  Cyclic GFR-binding peptide
  MOD_RES (14)..(15): Xaa is C or S
IYLVSIPSLKTPAXXPKPVH

SEQ ID NO: 10319 - protein, 26 aa, Artificial Sequence
  Cyclic GFR-binding peptide
  MOD_RES (20)..(21): Xaa is C or S
VNSSDDIYLVSIPSLKTPAXXPKPVH

SEQ ID NO: 10320 - protein, 16 aa, Artificial Sequence
  Cyclic GFR-binding peptide
VVNNASDIYLISIPSL

SEQ ID NO: 10321 - protein, 22 aa, Artificial Sequence
  Cyclic GFR-binding peptide
  MOD_RES (16)..(17): Xaa is C or S
SDIYLISIPSLRTPVXXTPPTS

SEQ ID NO: 10322 - protein, 20 aa, Artificial Sequence
  Cyclic GFR-binding peptide
  MOD_RES (14)..(15): Xaa is C or S
IYLMSIPSTKVPAXXTSPVR

SEQ ID NO: 10323 - protein, 22 aa, Artificial Sequence
  Cyclic GFR-binding peptide
  MOD_RES (16)..(17): Xaa is C or S
DNIYLMSIPSMKTPTXXPGASG

SEQ ID NO: 10324 - protein, 25 aa, Artificial Sequence
  Cyclic GFR-binding peptide
  MOD_RES (19)..(20): Xaa is C or S
NNASDIYLISIPSLRTPVXXTPPTS

SEQ ID NO: 10325 - protein, 27 aa, Artificial Sequence
  Cyclic GFR-binding peptide
  MOD_RES (21)..(22): Xaa is C or S
IVNSSDDIYLVSIPSLKTPAXXPKPVH

SEQ ID NO: 10326 - protein, 16 aa, Artificial Sequence
  Cyclic GFR-binding peptide
  MOD_RES (14)..(15): Xaa is C or S
IYLMSIPSMKTPTXXP

SEQ ID NO: 10327 - protein, 18 aa, Artificial Sequence
  Cyclic GFR-binding peptide
  MOD_RES (14)..(15): Xaa is C or S
IYLISIPSLRTPVXXTPP

SEQ ID NO: 10328 - protein, 15 aa, Artificial Sequence
  Cyclic GFR-binding peptide
  MOD_RES (14)..(15): Xaa is C or S
IYLISIPSLRTPVXX

SEQ ID NO: 10329 - protein, 19 aa, Artificial Sequence
  Cyclic GFR-binding peptide
IIQQKDNIYLMSIPSMKTP

SEQ ID NO: 10330 - protein, 24 aa, Artificial Sequence
  Cyclic GFR-binding peptide
  MOD_RES (18)..(19): Xaa is C or S
RGNDIYLMSIPSTKVPAXXTSPVR

SEQ ID NO: 10331 - protein, 13 aa, Artificial Sequence
  Cyclic GFR-binding peptide
IYLISIPSLRTPV

SEQ ID NO: 10332 - protein, 27 aa, Artificial Sequence
  Cyclic GFR-binding peptide
  MOD_RES (21)..(22): Xaa is C or S
LLVRGNDIYLMSIPSTKVPAXXTSPVR

SEQ ID NO: 10333 - protein, 20 aa, Artificial Sequence
  Cyclic GFR-binding peptide
  MOD_RES (14)..(15): Xaa is C or S
IYLISIPSLRTPVXXTPPTS

SEQ ID NO: 10334 - protein, 13 aa, Artificial Sequence
  Cyclic GFR-binding peptide
IYLMSIPSTKVPA

SEQ ID NO: 10335 - protein, 17 aa, Artificial Sequence
  Cyclic GFR-binding peptide
VVNNASDIYLISIPSLR

SEQ ID NO: 10336 - protein, 21 aa, Artificial Sequence
  Cyclic GFR-binding peptide
  MOD_RES (15)..(16): Xaa is C or S
DIYLVSIPSLKTPAXXPKPVH

SEQ ID NO: 10337 - protein, 19 aa, Artificial Sequence
  Cyclic GFR-binding peptide
LLVRGNDIYLMSIPSTKVP

SEQ ID NO: 10338 - protein, 22 aa, Artificial Sequence
  Cyclic GFR-binding peptide
  MOD_RES (16)..(17): Xaa is C or S
DDIYLVSIPSLKTPAXXPKPVH

SEQ ID NO: 10339 - protein, 17 aa, Artificial Sequence
  Cyclic GFR-binding peptide
IIQQKDNIYLMSIPSMK

SEQ ID NO: 10340 - protein, 16 aa, Artificial Sequence
  Cyclic GFR-binding peptide
IIQQKDNIYLMSIPSM

SEQ ID NO: 10341 - protein, 17 aa, Artificial Sequence
  Cyclic GFR-binding peptide
  MOD_RES (14)..(15): Xaa is C or S
IYLISIPSLRTPVXXTP

SEQ ID NO: 10342 - protein, 22 aa, Artificial Sequence
  Cyclic GFR-binding peptide
  MOD_RES (16)..(17): Xaa is C or S
NDIYLMSIPSTKVPAXXTSPVR

SEQ ID NO: 10343 - protein, 19 aa, Artificial Sequence
  Cyclic GFR-binding peptide
  MOD_RES (14)..(15): Xaa is C or S
IYLMSIPSMKTPTXXPGAS

SEQ ID NO: 10344 - protein, 14 aa, Artificial Sequence
  Cyclic GFR-binding peptide
  MOD_RES (14)..(14): Xaa is C or S
IYLISIPSLRTPVX

SEQ ID NO: 10345 - protein, 24 aa, Artificial Sequence
  Cyclic GFR-binding peptide
  MOD_RES (18)..(19): Xaa is C or S
SSDDIYLVSIPSLKTPAXXPKPVH

SEQ ID NO: 10346 - protein, 26 aa, Artificial Sequence
  Cyclic GFR-binding peptide
  MOD_RES (20)..(21): Xaa is C or S
IQQKDNIYLMSIPSMKTPTXXPGASG

SEQ ID NO: 10347 - protein, 15 aa, Artificial Sequence
  Cyclic GFR-binding peptide
VVNNASDIYLISIPS

SEQ ID NO: 10348 - protein, 25 aa, Artificial Sequence
  Cyclic GFR-binding peptide
  MOD_RES (19)..(20): Xaa is C or S
NSSDDIYLVSIPSLKTPAXXPKPVH

SEQ ID NO: 10349 - protein, 13 aa, Artificial Sequence
  Cyclic GFR-binding peptide
IYLMSIPSMKTPT

SEQ ID NO: 10350 - protein, 24 aa, Artificial Sequence
  Cyclic GFR-binding peptide
  MOD_RES (18)..(19): Xaa is C or S
NASDIYLISIPSLRTPVXXTPPTS

SEQ ID NO: 10351 - protein, 16 aa, Artificial Sequence
  Cyclic GFR-binding peptide
LLVRGNDIYLMSIPST

SEQ ID NO: 10352 - protein, 19 aa, Artificial Sequence
  Cyclic GFR-binding peptide
  MOD_RES (14)..(15): Xaa is C or S
IYLMSIPSTKVPAXXTSPV

SEQ ID NO: 10353 - protein, 15 aa, Artificial Sequence
  Cyclic GFR-binding peptide
IIQQKDNIYLMSIPS

SEQ ID NO: 10354 - protein, 27 aa, Artificial Sequence
  Cyclic GFR-binding peptide
  MOD_RES (21)..(22): Xaa is C or S
IIQQKDNIYLMSIPSMKTPTXXPGASG

SEQ ID NO: 10355 - protein, 21 aa, Artificial Sequence
  Cyclic GFR-binding peptide
  MOD_RES (15)..(16): Xaa is C or S
NIYLMSIPSMKTPTXXPGASG

SEQ ID NO: 10356 - protein, 18 aa, Artificial Sequence
  Cyclic GFR-binding peptide
  MOD_RES (14)..(15): Xaa is C or S
IYLMSIPSTKVPAXXTSP

SEQ ID NO: 10357 - protein, 15 aa, Artificial Sequence
  Cyclic GFR-binding peptide
  MOD_RES (14)..(15): Xaa is C or S
IYLMSIPSMKTPTXX

SEQ ID NO: 10358 - protein, 21 aa, Artificial Sequence
  Cyclic GFR-binding peptide
  MOD_RES (15)..(16): Xaa is C or S
DIYLMSIPSTKVPAXXTSPVR

SEQ ID NO: 10359 - protein, 18 aa, Artificial Sequence
  Cyclic GFR-binding peptide
LLVRGNDIYLMSIPSTKV

SEQ ID NO: 10360 - protein, 16 aa, Artificial Sequence
  Cyclic GFR-binding peptide
  MOD_RES (14)..(15): Xaa is C or S
IYLISIPSLRTPVXXT

SEQ ID NO: 10361 - protein, 26 aa, Artificial Sequence
  Cyclic GFR-binding peptide
  MOD_RES (20)..(21): Xaa is C or S
LVRGNDIYLMSIPSTKVPAXXTSPVR

SEQ ID NO: 10362 - protein, 18 aa, Artificial Sequence
  Cyclic GFR-binding peptide
  MOD_RES (14)..(15): Xaa is C or S
IYLMSIPSMKTPTXXPGA

SEQ ID NO: 10363 - protein, 15 aa, Artificial Sequence
  Cyclic GFR-binding peptide
LLVRGNDIYLMSIPS

SEQ ID NO: 10364 - protein, 26 aa, Artificial Sequence
  Cyclic GFR-binding peptide
  MOD_RES (20)..(21): Xaa is C or S
VNNASDIYLISIPSLRTPVXXTPPTS

SEQ ID NO: 10365 - protein, 16 aa, Artificial Sequence
  Cyclic GFR-binding peptide
  MOD_RES (14)..(15): Xaa is C or S
IYLMSIPSTKVPAXXT

SEQ ID NO: 10366 - protein, 18 aa, Artificial Sequence
  Cyclic GFR-binding peptide
VVNNASDIYLISIPSLRT

SEQ ID NO: 10367 - protein, 23 aa, Artificial Sequence
  Cyclic GFR-binding peptide
  MOD_RES (17)..(18): Xaa is C or S
ASDIYLISIPSLRTPVXXTPPTS

SEQ ID NO: 10368 - protein, 18 aa, Artificial Sequence
  Cyclic GFR-binding peptide
IIQQKDNIYLMSIPSMKT

SEQ ID NO: 10369 - protein, 23 aa, Artificial Sequence
  Cyclic GFR-binding peptide
  MOD_RES (17)..(18): Xaa is C or S
GNDIYLMSIPSTKVPAXXTSPVR

SEQ ID NO: 10370 - protein, 17 aa, Artificial Sequence
  Cyclic GFR-binding peptide
  MOD_RES (14)..(15): Xaa is C or S
IYLMSIPSTKVPAXXTS

SEQ ID NO: 10371 - protein, 24 aa, Artificial Sequence
  Cyclic GFR-binding peptide
  MOD_RES (18)..(19): Xaa is C or S
QKDNIYLMSIPSMKTPTXXPGASG

SEQ ID NO: 10372 - protein, 14 aa, Artificial Sequence
  Cyclic GFR-binding peptide
  MOD_RES (14)..(14): Xaa is C or S
IYLMSIPSMKTPTX

SEQ ID NO: 10373 - protein, 25 aa, Artificial Sequence
  Cyclic GFR-binding peptide
  MOD_RES (6)..(7): Xaa is C or S
RVPSTXXAPVKTSPISMLYIDNGRV

SEQ ID NO: 10374 - protein, 20 aa, Artificial Sequence
  Cyclic GFR-binding peptide
  MOD_RES (6)..(7): Xaa is C or S
GSAGPXXTPTKMSPISMLYI

SEQ ID NO: 10375 - protein, 23 aa, Artificial Sequence
  Cyclic GFR-binding peptide
  MOD_RES (6)..(7): Xaa is C or S
GSAGPXXTPTKMSPISMLYINDK

SEQ ID NO: 10376 - protein, 15 aa, Artificial Sequence
  Cyclic GFR-binding peptide
  MOD_RES (1)..(2): Xaa is C or S
XXAPVKTSPISMLYI

SEQ ID NO: 10377 - protein, 23 aa, Artificial Sequence
  Cyclic GFR-binding peptide
  MOD_RES (6)..(7): Xaa is C or S
HVPKPXXAPTKLSPISVLYIDDS

SEQ ID NO: 10378 - protein, 19 aa, Artificial Sequence
  Cyclic GFR-binding peptide
PTRLSPISILYIDSANNVV

SEQ ID NO: 10379 - protein, 25 aa, Artificial Sequence
  Cyclic GFR-binding peptide
  MOD_RES (6)..(7): Xaa is C or S
GSAGPXXTPTKMSPISMLYINDKQQ

SEQ ID NO: 10380 - protein, 21 aa, Artificial Sequence
  Cyclic GFR-binding peptide
  MOD_RES (6)..(7): Xaa is C or S
STPPTXXVPTRLSPISILYID

SEQ ID NO: 10381 - protein, 17 aa, Artificial Sequence
  Cyclic GFR-binding peptide
  MOD_RES (3)..(4): Xaa is C or S
GPXXTPTKMSPISMLYI

SEQ ID NO: 10382 - protein, 14 aa, Artificial Sequence
  Cyclic GFR-binding peptide
  MOD_RES (1)..(1): Xaa is C or S
XAPVKTSPISMLYI

SEQ ID NO: 10383 - protein, 19 aa, Artificial Sequence
  Cyclic GFR-binding peptide
  MOD_RES (5)..(6): Xaa is C or S
TPPTXXVPTRLSPISILYI

SEQ ID NO: 10384 - protein, 17 aa, Artificial Sequence
  Cyclic GFR-binding peptide
KTSPISMLYIDNGRVLL

SEQ ID NO: 10385 - protein, 27 aa, Artificial Sequence
  Cyclic GFR-binding peptide
  MOD_RES (6)..(7): Xaa is C or S
STPPTXXVPTRLSPISILYIDSANNVV

SEQ ID NO: 10386 - protein, 20 aa, Artificial Sequence
  Cyclic GFR-binding peptide
  MOD_RES (6)..(7): Xaa is C or S
HVPKPXXAPTKLSPISVLYI

SEQ ID NO: 10387 - protein, 26 aa, Artificial Sequence
  Cyclic GFR-binding peptide
  MOD_RES (6)..(7): Xaa is C or S
HVPKPXXAPTKLSPISVLYIDDSSNV

SEQ ID NO: 10388 - protein, 16 aa, Artificial Sequence
  Cyclic GFR-binding peptide
LSPISILYIDSANNVV

SEQ ID NO: 10389 - protein, 22 aa, Artificial Sequence
  Cyclic GFR-binding peptide
  MOD_RES (6)..(7): Xaa is C or S
STPPTXXVPTRLSPISILYIDS

SEQ ID NO: 10390 - protein, 20 aa, Artificial Sequence
  Cyclic GFR-binding peptide
  MOD_RES (6)..(7): Xaa is C or S
RVPSTXXAPVKTSPISMLYI

SEQ ID NO: 10391 - protein, 22 aa, Artificial Sequence
  Cyclic GFR-binding peptide
  MOD_RES (6)..(7): Xaa is C or S
GSAGPXXTPTKMSPISMLYIND

SEQ ID NO: 10392 - protein, 25 aa, Artificial Sequence
  Cyclic GFR-binding peptide
  MOD_RES (6)..(7): Xaa is C or S
STPPTXXVPTRLSPISILYIDSANN

SEQ ID NO: 10393 - protein, 27 aa, Artificial Sequence
  Cyclic GFR-binding peptide
  MOD_RES (6)..(7): Xaa is C or S
HVPKPXXAPTKLSPISVLYIDDSSNVI

SEQ ID NO: 10394 - protein, 16 aa, Artificial Sequence
  Cyclic GFR-binding peptide
  MOD_RES (2)..(3): Xaa is C or S
PXXTPTKMSPISMLYI

SEQ ID NO: 10395 - protein, 18 aa, Artificial Sequence
  Cyclic GFR-binding peptide
  MOD_RES (4)..(5): Xaa is C or S
PPTXXVPTRLSPISILYI

SEQ ID NO: 10396 - protein, 15 aa, Artificial Sequence
  Cyclic GFR-binding peptide
  MOD_RES (1)..(2): Xaa is C or S
XXVPTRLSPISILYI

SEQ ID NO: 10397 - protein, 19 aa, Artificial Sequence
  Cyclic GFR-binding peptide
PTKMSPISMLYINDKQQII

SEQ ID NO: 10398 - protein, 24 aa, Artificial Sequence
  Cyclic GFR-binding peptide
  MOD_RES (6)..(7): Xaa is C or S
RVPSTXXAPVKTSPISMLYIDNGR

SEQ ID NO: 10399 - protein, 13 aa, Artificial Sequence
  Cyclic GFR-binding peptide
VPTRLSPISILYI

SEQ ID NO: 10400 - protein, 27 aa, Artificial Sequence
  Cyclic GFR-binding peptide
  MOD_RES (6)..(7): Xaa is C or S
RVPSTXXAPVKTSPISMLYIDNGRVLL

SEQ ID NO: 10401 - protein, 20 aa, Artificial Sequence
  Cyclic GFR-binding peptide
  MOD_RES (6)..(7): Xaa is C or S
STPPTXXVPTRLSPISILYI

SEQ ID NO: 10402 - protein, 13 aa, Artificial Sequence
  Cyclic GFR-binding peptide
APVKTSPISMLYI

SEQ ID NO: 10403 - protein, 17 aa, Artificial Sequence
  Cyclic GFR-binding peptide
RLSPISILYIDSANNVV

SEQ ID NO: 10404 - protein, 21 aa, Artificial Sequence
  Cyclic GFR-binding peptide
  MOD_RES (6)..(7): Xaa is C or S
HVPKPXXAPTKLSPISVLYID

SEQ ID NO: 10405 - protein, 19 aa, Artificial Sequence
  Cyclic GFR-binding peptide
PVKTSPISMLYIDNGRVLL

SEQ ID NO: 10406 - protein, 22 aa, Artificial Sequence
  Cyclic GFR-binding peptide
  MOD_RES (6)..(7): Xaa is C or S
HVPKPXXAPTKLSPISVLYIDD

SEQ ID NO: 10407 - protein, 17 aa, Artificial Sequence
  Cyclic GFR-binding peptide
KMSPISMLYINDKQQII

SEQ ID NO: 10408 - protein, 16 aa, Artificial Sequence
  Cyclic GFR-binding peptide
MSPISMLYINDKQQII

SEQ ID NO: 10409 - protein, 17 aa, Artificial Sequence
  Cyclic GFR-binding peptide
  MOD_RES (3)..(4): Xaa is C or S
PTXXVPTRLSPISILYI

SEQ ID NO: 10410 - protein, 22 aa, Artificial Sequence
  Cyclic GFR-binding peptide
  MOD_RES (6)..(7): Xaa is C or S
RVPSTXXAPVKTSPISMLYIDN

SEQ ID NO: 10411 - protein, 19 aa, Artificial Sequence
  Cyclic GFR-binding peptide
  MOD_RES (5)..(6): Xaa is C or S
SAGPXXTPTKMSPISMLYI

SEQ ID NO: 10412 - protein, 14 aa, Artificial Sequence
  Cyclic GFR-binding peptide
  MOD_RES (1)..(1): Xaa is C or S
XVPTRLSPISILYI

SEQ ID NO: 10413 - protein, 24 aa, Artificial Sequence
  Cyclic GFR-binding peptide
  MOD_RES (6)..(7): Xaa is C or S
HVPKPXXAPTKLSPISVLYIDDSS

SEQ ID NO: 10414 - protein, 26 aa, Artificial Sequence
  Cyclic GFR-binding peptide
  MOD_RES (6)..(7): Xaa is C or S
GSAGPXXTPTKMSPISMLYINDKQQI

SEQ ID NO: 10415 - protein, 15 aa, Artificial Sequence
  Cyclic GFR-binding peptide
SPISILYIDSANNVV

SEQ ID NO: 10416 - protein, 25 aa, Artificial Sequence
  Cyclic GFR-binding peptide
  MOD_RES (6)..(7): Xaa is C or S
HVPKPXXAPTKLSPISVLYIDDSSN

SEQ ID NO: 10417 - protein, 13 aa, Artificial Sequence
  Cyclic GFR-binding peptide
TPTKMSPISMLYI

SEQ ID NO: 10418 - protein, 24 aa, Artificial Sequence
  Cyclic GFR-binding peptide
  MOD_RES (6)..(7): Xaa is C or S
STPPTXXVPTRLSPISILYIDSAN

SEQ ID NO: 10419 - protein, 16 aa, Artificial Sequence
  Cyclic GFR-binding peptide
TSPISMLYIDNGRVLL

SEQ ID NO: 10420 - protein, 19 aa, Artificial Sequence
  Cyclic GFR-binding peptide
  MOD_RES (5)..(6): Xaa is C or S
VPSTXXAPVKTSPISMLYI

SEQ ID NO: 10421 - protein, 15 aa, Artificial Sequence
  Cyclic GFR-binding peptide
SPISMLYINDKQQII

SEQ ID NO: 10422 - protein, 27 aa, Artificial Sequence
  Cyclic GFR-binding peptide
  MOD_RES (6)..(7): Xaa is C or S
GSAGPXXTPTKMSPISMLYINDKQQII

SEQ ID NO: 10423 - protein, 21 aa, Artificial Sequence
  Cyclic GFR-binding peptide
  MOD_RES (6)..(7): Xaa is C or S
GSAGPXXTPTKMSPISMLYIN

SEQ ID NO: 10424 - protein, 18 aa, Artificial Sequence
  Cyclic GFR-binding peptide
  MOD_RES (4)..(5): Xaa is C or S
PSTXXAPVKTSPISMLYI

SEQ ID NO: 10425 - protein, 15 aa, Artificial Sequence
  Cyclic GFR-binding peptide
  MOD_RES (1)..(2): Xaa is C or S
XXTPTKMSPISMLYI

SEQ ID NO: 10426 - protein, 21 aa, Artificial Sequence
  Cyclic GFR-binding peptide
  MOD_RES (6)..(7): Xaa is C or S
RVPSTXXAPVKTSPISMLYID

SEQ ID NO: 10427 - protein, 18 aa, Artificial Sequence
  Cyclic GFR-binding peptide
VKTSPISMLYIDNGRVLL

SEQ ID NO: 10428 - protein, 16 aa, Artificial Sequence
  Cyclic GFR-binding peptide
  MOD_RES (2)..(3): Xaa is C or S
TXXVPTRLSPISILYI

SEQ ID NO: 10429 - protein, 26 aa, Artificial Sequence
  Cyclic GFR-binding peptide
  MOD_RES (6)..(7): Xaa is C or S
RVPSTXXAPVKTSPISMLYIDNGRVL

SEQ ID NO: 10430 - protein, 18 aa, Artificial Sequence
  Cyclic GFR-binding peptide
  MOD_RES (4)..(5): Xaa is C or S
AGPXXTPTKMSPISMLYI

SEQ ID NO: 10431 - protein, 15 aa, Artificial Sequence
  Cyclic GFR-binding peptide
SPISMLYIDNGRVLL

SEQ ID NO: 10432 - protein, 26 aa, Artificial Sequence
  Cyclic GFR-binding peptide
  MOD_RES (6)..(7): Xaa is C or S
STPPTXXVPTRLSPISILYIDSANNV

SEQ ID NO: 10433 - protein, 16 aa, Artificial Sequence
  Cyclic GFR-binding peptide
  MOD_RES (2)..(3): Xaa is C or S
TXXAPVKTSPISMLYI

SEQ ID NO: 10434 - protein, 18 aa, Artificial Sequence
  Cyclic GFR-binding peptide
TRLSPISILYIDSANNVV

SEQ ID NO: 10435 - protein, 23 aa, Artificial Sequence
  Cyclic GFR-binding peptide
  MOD_RES (6)..(7): Xaa is C or S
STPPTXXVPTRLSPISILYIDSA

SEQ ID NO: 10436 - protein, 18 aa, Artificial Sequence
  Cyclic GFR-binding peptide
TKMSPISMLYINDKQQII

SEQ ID NO: 10437 - protein, 23 aa, Artificial Sequence
  Cyclic GFR-binding peptide
  MOD_RES (6)..(7): Xaa is C or S
RVPSTXXAPVKTSPISMLYIDNG

SEQ ID NO: 10438 - protein, 17 aa, Artificial Sequence
  Cyclic GFR-binding peptide
  MOD_RES (3)..(4): Xaa is C or S
STXXAPVKTSPISMLYI

SEQ ID NO: 10439 - protein, 24 aa, Artificial Sequence
  Cyclic GFR-binding peptide
  MOD_RES (6)..(7): Xaa is C or S
GSAGPXXTPTKMSPISMLYINDKQ

SEQ ID NO: 10440 - protein, 14 aa, Artificial Sequence
  Cyclic GFR-binding peptide
  MOD_RES (1)..(1): Xaa is C or S
XTPTKMSPISMLYI

SEQ ID NO: 10441 - protein, 23 aa, Artificial Sequence
  Cyclic GFR-binding peptide
  MOD_RES (17)..(18): Xaa is C or S
SDDFFLVSLSSLKTPAXXPKPVH

SEQ ID NO: 10442 - protein, 18 aa, Artificial Sequence
  Cyclic GFR-binding peptide
IVNSSDDFFLVSLSSLKT

SEQ ID NO: 10443 - protein, 27 aa, Artificial Sequence
  Cyclic GFR-binding peptide
  MOD_RES (21)..(21): Xaa is C or S
IVNSSDDFFLVSLSSLKTPAXTPKTVH

SEQ ID NO: 10444 - protein, 15 aa, Artificial Sequence
  Cyclic GFR-binding peptide
  MOD_RES (14)..(14): Xaa is C or S
FFLVSLSSLKTPAXT

SEQ ID NO: 10445 - protein, 20 aa, Artificial Sequence
  Cyclic GFR-binding peptide
  MOD_RES (14)..(15): Xaa is C or S
FFLVSLSSLKTPAXXPKPVY

SEQ ID NO: 10446 - protein, 25 aa, Artificial Sequence
  Cyclic GFR-binding peptide
  MOD_RES (19)..(20): Xaa is C or S
NNSSDFFLVSLSSLKTPAXXAKPVA

SEQ ID NO: 10447 - protein, 23 aa, Artificial Sequence
  Cyclic GFR-binding peptide
  MOD_RES (17)..(18): Xaa is C or S
KDNFFLMSLSSMKTPTXXPGASG

SEQ ID NO: 10448 - protein, 24 aa, Artificial Sequence
  Cyclic GFR-binding peptide
  MOD_RES (18)..(19): Xaa is C or S
SSDDFFLVSLSSLQTPAXXPKPVT

SEQ ID NO: 10449 - protein, 20 aa, Artificial Sequence
  Cyclic GFR-binding peptide
  MOD_RES (14)..(15): Xaa is C or S
FFLISLSSLAQPVXXPAASA

SEQ ID NO: 10450 - protein, 25 aa, Artificial Sequence
  Cyclic GFR-binding peptide
  MOD_RES (19)..(20): Xaa is C or S
NNASDFFLISLSSLRTPVXXTPPTS

SEQ ID NO: 10451 - protein, 15 aa, Artificial Sequence
  Cyclic GFR-binding peptide
YTVVGKDFFLISLSS

SEQ ID NO: 10452 - protein, 18 aa, Artificial Sequence
  Cyclic GFR-binding peptide
  MOD_RES (14)..(14): Xaa is C or S
FFLMSLSSEETPVXELGE

SEQ ID NO: 10453 - protein, 19 aa, Artificial Sequence
  Cyclic GFR-binding peptide
  MOD_RES (14)..(15): Xaa is C or S
FFLVSLSSLKTPAXXAKPV

SEQ ID NO: 10454 - protein, 15 aa, Artificial Sequence
  Cyclic GFR-binding peptide
VVNNASDFFLISLSS

SEQ ID NO: 10455 - protein, 15 aa, Artificial Sequence
  Cyclic GFR-binding peptide
  MOD_RES (14)..(15): Xaa is C or S
FFLISLSSLDQSVXX

SEQ ID NO: 10456 - protein, 19 aa, Artificial Sequence
  Cyclic GFR-binding peptide
HQGQHPKIRFFLMSLSSEE

SEQ ID NO: 10457 - protein, 17 aa, Artificial Sequence
  Cyclic GFR-binding peptide
TPVGMDDFFLVSLSSLK

SEQ ID NO: 10458 - protein, 14 aa, Artificial Sequence
  Cyclic GFR-binding peptide
  MOD_RES (14)..(14): Xaa is C or S
FFLMSLSSMKTPTX

SEQ ID NO: 10459 - protein, 18 aa, Artificial Sequence
  Cyclic GFR-binding peptide
VVKDYEDFFLMSLSSLET

SEQ ID NO: 10460 - protein, 13 aa, Artificial Sequence
  Cyclic GFR-binding peptide
FFLMSLSSTKVPA

SEQ ID NO: 10461 - protein, 26 aa, Artificial Sequence
  Cyclic GFR-binding peptide
  MOD_RES (20)..(21): Xaa is C or S
VNSSDDFFLVSLSSLKTPAXXPKPVY

SEQ ID NO: 10462 - protein, 18 aa, Artificial Sequence
  Cyclic GFR-binding peptide
HQGQHPKIRFFLMSLSSE

SEQ ID NO: 10463 - protein, 18 aa, Artificial Sequence
  Cyclic GFR-binding peptide
  MOD_RES (14)..(15): Xaa is C or S
FFLVSLSSLKTPAXXAKP

SEQ ID NO: 10464 - protein, 18 aa, Artificial Sequence
  Cyclic GFR-binding peptide
IVNSSDDFFLVSLSSLQT

SEQ ID NO: 10465 - protein, 22 aa, Artificial Sequence
  Cyclic GFR-binding peptide
  MOD_RES (16)..(17): Xaa is C or S
DNFFLMSLSSMKTPTXXPGASG

SEQ ID NO: 10466 - protein, 16 aa, Artificial Sequence
  Cyclic GFR-binding peptide
  MOD_RES (14)..(15): Xaa is C or S
FFLMSLSSTKVPAXXT

SEQ ID NO: 10467 - protein, 27 aa, Artificial Sequence
  Cyclic GFR-binding peptide
  MOD_RES (23)..(23): Xaa is C or S
PKKRVYEFFLVSLSSHHVRSPQXKVSS

SEQ ID NO: 10468 - protein, 18 aa, Artificial Sequence
  Cyclic GFR-binding peptide
IVNNSSDFFLVSLSSLKT

SEQ ID NO: 10469 - protein, 22 aa, Artificial Sequence
  Cyclic GFR-binding peptide
  MOD_RES (18)..(18): Xaa is C or S
YEFFLVSLSSHHVRSPQXKVSS

SEQ ID NO: 10470 - protein, 19 aa, Artificial Sequence
  Cyclic GFR-binding peptide
LKPKKRVYEFFLVSLSSHH

SEQ ID NO: 10471 - protein, 23 aa, Artificial Sequence
  Cyclic GFR-binding peptide
  MOD_RES (17)..(18): Xaa is C or S
SDDFFLVSLSSLKTPAXXPKPVY

SEQ ID NO: 10472 - protein, 24 aa, Artificial Sequence
  Cyclic GFR-binding peptide
  MOD_RES (18)..(19): Xaa is C or S
GMDDFFLVSLSSLKTPVXXAKGVK

SEQ ID NO: 10473 - protein, 20 aa, Artificial Sequence
  Cyclic GFR-binding peptide
  MOD_RES (14)..(15): Xaa is C or S
FFLMSLSSLETPVXXAKPIS

SEQ ID NO: 10474 - protein, 17 aa, Artificial Sequence
  Cyclic GFR-binding peptide
LKPKKRVYEFFLVSLSS

SEQ ID NO: 10475 - protein, 22 aa, Artificial Sequence
  Cyclic GFR-binding peptide
  MOD_RES (16)..(17): Xaa is C or S
GIFFLISLSSLDQSVXXPSASA

SEQ ID NO: 10476 - protein, 17 aa, Artificial Sequence
  Cyclic GFR-binding peptide
IIQQKDNFFLMSLSSMK

SEQ ID NO: 10477 - protein, 22 aa, Artificial Sequence
  Cyclic GFR-binding peptide
  MOD_RES (16)..(17): Xaa is C or S
GVFFLISLSSLDQPVXXPSASA

SEQ ID NO: 10478 - protein, 19 aa, Artificial Sequence
  Cyclic GFR-binding peptide
LLVRGNDFFLMSLSSTKVP

SEQ ID NO: 10479 - protein, 18 aa, Artificial Sequence
  Cyclic GFR-binding peptide
VKPTRGVFFLISLSSLDQ

SEQ ID NO: 10480 - protein, 25 aa, Artificial Sequence
  Cyclic GFR-binding peptide
  MOD_RES (19)..(19): Xaa is C or S
NSSDDFFLVSLSSLKTPAXTPKTVH

SEQ ID NO: 10481 - protein, 17 aa, Artificial Sequence
  Cyclic GFR-binding peptide
  MOD_RES (14)..(14): Xaa is C or S
FFLMSLSSEETPVXELG

SEQ ID NO: 10482 - protein, 27 aa, Artificial Sequence
  Cyclic GFR-binding peptide
  MOD_RES (21)..(21): Xaa is C or S
GQHPKIRFFLMSLSSEETPVXELGEDN

SEQ ID NO: 10483 - protein, 13 aa, Artificial Sequence
  Cyclic GFR-binding peptide
FFLVSLSSLKTPA

SEQ ID NO: 10484 - protein, 21 aa, Artificial Sequence
  Cyclic GFR-binding peptide
LKPKKRVYEFFLVSLSSHHVR

SEQ ID NO: 10485 - protein, 18 aa, Artificial Sequence
  Cyclic GFR-binding peptide
YTVVGKDFFLISLSSLKT

SEQ ID NO: 10486 - protein, 22 aa, Artificial Sequence
  Cyclic GFR-binding peptide
  MOD_RES (16)..(17): Xaa is C or S
SDFFLISLSSLRTPVXXTPPTS

SEQ ID NO: 10487 - protein, 16 aa, Artificial Sequence
  Cyclic GFR-binding peptide
  MOD_RES (14)..(15): Xaa is C or S
FFLMSLSSLETPVXXA

SEQ ID NO: 10488 - protein, 17 aa, Artificial Sequence
  Cyclic GFR-binding peptide
IVNSSDDFFLVSLSSLQ

SEQ ID NO: 10489 - protein, 27 aa, Artificial Sequence
  Cyclic GFR-binding peptide
  MOD_RES (21)..(22): Xaa is C or S
VVNNAADFFLISLSSLRAPVXXSAPAA

SEQ ID NO: 10490 - protein, 18 aa, Artificial Sequence
  Cyclic GFR-binding peptide
  MOD_RES (14)..(15): Xaa is C or S
FFLVSLSSLQTPAXXPKP

SEQ ID NO: 10491 - protein, 23 aa, Artificial Sequence
  Cyclic GFR-binding peptide
  MOD_RES (17)..(18): Xaa is C or S
AADFFLISLSSLRAPVXXSAPAA

SEQ ID NO: 10492 - protein, 27 aa, Artificial Sequence
  Cyclic GFR-binding peptide
  MOD_RES (21)..(22): Xaa is C or S
LLVRGNDFFLMSLSSTKVPAXXTSPVR

SEQ ID NO: 10493 - protein, 21 aa, Artificial Sequence
  Cyclic GFR-binding peptide
  MOD_RES (15)..(16): Xaa is C or S
DFFLISLSSLRTPVXXTPPTS

SEQ ID NO: 10494 - protein, 27 aa, Artificial Sequence
  Cyclic GFR-binding peptide
  MOD_RES (21)..(22): Xaa is C or S
IVNSSDDFFLVSLSSLQTPAXXPKPVT

SEQ ID NO: 10495 - protein, 26 aa, Artificial Sequence
  Cyclic GFR-binding peptide
  MOD_RES (20)..(21): Xaa is C or S
TVVGKDFFLISLSSLKTPVXXAKSAK

SEQ ID NO: 10496 - protein, 15 aa, Artificial Sequence
  Cyclic GFR-binding peptide
  MOD_RES (14)..(15): Xaa is C or S
FFLISLSSLRTPVXX

SEQ ID NO: 10497 - protein, 19 aa, Artificial Sequence
  Cyclic GFR-binding peptide
VKPKRGVFFLISLSSLAQP

SEQ ID NO: 10498 - protein, 20 aa, Artificial Sequence
  Cyclic GFR-binding peptide
LKPKKRVYEFFLVSLSSHHV

SEQ ID NO: 10499 - protein, 16 aa, Artificial Sequence
  Cyclic GFR-binding peptide
  MOD_RES (14)..(15): Xaa is C or S
FFLISLSSLRAPVXXS

SEQ ID NO: 10500 - protein, 14 aa, Artificial Sequence
  Cyclic GFR-binding peptide
  MOD_RES (14)..(14): Xaa is C or S
FFLISLSSLDQPVX

SEQ ID NO: 10501 - protein, 17 aa, Artificial Sequence
  Cyclic GFR-binding peptide
IVNSSDDFFLVSLSSLK

SEQ ID NO: 10502 - protein, 19 aa, Artificial Sequence
  Cyclic GFR-binding peptide
  MOD_RES (14)..(15): Xaa is C or S
FFLVSLSSLQTPAXXPKPV

SEQ ID NO: 10503 - protein, 14 aa, Artificial Sequence
  Cyclic GFR-binding peptide
  MOD_RES (14)..(14): Xaa is C or S
FFLMSLSSLETPVX

SEQ ID NO: 10504 - protein, 14 aa, Artificial Sequence
  Cyclic GFR-binding peptide
  MOD_RES (14)..(14): Xaa is C or S
FFLVSLSSLQTPAX

SEQ ID NO: 10505 - protein, 14 aa, Artificial Sequence
  Cyclic GFR-binding peptide
  MOD_RES (14)..(14): Xaa is C or S
FFLISLSSLAQPVX

SEQ ID NO: 10506 - protein, 16 aa, Artificial Sequence
  Cyclic GFR-binding peptide
  MOD_RES (14)..(14): Xaa is C or S
FFLMSLSSEETPVXEL

SEQ ID NO: 10507 - protein, 15 aa, Artificial Sequence
  Cyclic GFR-binding peptide
  MOD_RES (14)..(15): Xaa is C or S
FFLMSLSSTKVPAXX

SEQ ID NO: 10508 - protein, 14 aa, Artificial Sequence
  Cyclic GFR-binding peptide
FFLVSLSSHHVRSP

SEQ ID NO: 10509 - protein, 19 aa, Artificial Sequence
  Cyclic GFR-binding peptide
  MOD_RES (14)..(15): Xaa is C or S
FFLISLSSLDQPVXXPSAS

SEQ ID NO: 10510 - protein, 16 aa, Artificial Sequence
  Cyclic GFR-binding peptide
  MOD_RES (14)..(15): Xaa is C or S
FFLISLSSLDQSVXXP

SEQ ID NO: 10511 - protein, 24 aa, Artificial Sequence
  Cyclic GFR-binding peptide
  MOD_RES (18)..(19): Xaa is C or S
SSDDFFLVSLSSLKTPAXXPKPVY

SEQ ID NO: 10512 - protein, 24 aa, Artificial Sequence
  Cyclic GFR-binding peptide
  MOD_RES (18)..(19): Xaa is C or S
RGNDFFLMSLSSTKVPAXXTSPVR

SEQ ID NO: 10513 - protein, 15 aa, Artificial Sequence
  Cyclic GFR-binding peptide
FFLVSLSSHHVRSPQ

SEQ ID NO: 10514 - protein, 15 aa, Artificial Sequence
  Cyclic GFR-binding peptide
VKPTRGVFFLISLSS

SEQ ID NO: 10515 - protein, 25 aa, Artificial Sequence
  Cyclic GFR-binding peptide
  MOD_RES (19)..(20): Xaa is C or S
PTKGIFFLISLSSLDQSVXXPSASA

SEQ ID NO: 10516 - protein, 14 aa, Artificial Sequence
  Cyclic GFR-binding peptide
  MOD_RES (14)..(14): Xaa is C or S
FFLISLSSLKTPVX

SEQ ID NO: 10517 - protein, 17 aa, Artificial Sequence
  Cyclic GFR-binding peptide
VVKDYEDFFLMSLSSLE

SEQ ID NO: 10518 - protein, 21 aa, Artificial Sequence
  Cyclic GFR-binding peptide
  MOD_RES (15)..(16): Xaa is C or S
DFFLVSLSSLKTPAXXPKPVY

SEQ ID NO: 10519 - protein, 13 aa, Artificial Sequence
  Cyclic GFR-binding peptide
FFLVSLSSLKTPV

SEQ ID NO: 10520 - protein, 24 aa, Artificial Sequence
  Cyclic GFR-binding peptide
  MOD_RES (18)..(19): Xaa is C or S
VGKDFFLISLSSLKTPVXXAKSAK

SEQ ID NO: 10521 - protein, 24 aa, Artificial Sequence
  Cyclic GFR-binding peptide
  MOD_RES (18)..(19): Xaa is C or S
NSSDFFLVSLSSLKTPAXXAKPVA

SEQ ID NO: 10522 - protein, 25 aa, Artificial Sequence
  Cyclic GFR-binding peptide
  MOD_RES (19)..(20): Xaa is C or S
VVGKDFFLISLSSLKTPVXXAKSAK

SEQ ID NO: 10523 - protein, 20 aa, Artificial Sequence
  Cyclic GFR-binding peptide
HQGQHPKIRFFLMSLSSEET

SEQ ID NO: 10524 - protein, 19 aa, Artificial Sequence
  Cyclic GFR-binding peptide
VVNNASDFFLISLSSLRTP

SEQ ID NO: 10525 - protein, 18 aa, Artificial Sequence
  Cyclic GFR-binding peptide
  MOD_RES (14)..(15): Xaa is C or S
FFLISLSSLAQPVXXPAA

SEQ ID NO: 10526 - protein, 28 aa, Artificial Sequence
  Cyclic GFR-binding peptide
  MOD_RES (22)..(22): Xaa is C or S
QGQHPKIRFFLMSLSSEETPVXELGEDN

SEQ ID NO: 10527 - protein, 19 aa, Artificial Sequence
  Cyclic GFR-binding peptide
VVKENEDFFLMSLSSLETP

SEQ ID NO: 10528 - protein, 19 aa, Artificial Sequence
  Cyclic GFR-binding peptide
VVNNAADFFLISLSSLRAP

SEQ ID NO: 10529 - protein, 22 aa, Artificial Sequence
  Cyclic GFR-binding peptide
  MOD_RES (16)..(17): Xaa is C or S
ADFFLISLSSLRAPVXXSAPAA

SEQ ID NO: 10530 - protein, 25 aa, Artificial Sequence
  Cyclic GFR-binding peptide
  MOD_RES (19)..(20): Xaa is C or S
NNAADFFLISLSSLRAPVXXSAPAA

SEQ ID NO: 10531 - protein, 18 aa, Artificial Sequence
  Cyclic GFR-binding peptide
  MOD_RES (14)..(15): Xaa is C or S
FFLMSLSSTKVPAXXTSP

SEQ ID NO: 10532 - protein, 24 aa, Artificial Sequence
  Cyclic GFR-binding peptide
  MOD_RES (18)..(18): Xaa is C or S
SSDDFFLVSLSSLKTPAXTPKTVH

SEQ ID NO: 10533 - protein, 26 aa, Artificial Sequence
  Cyclic GFR-binding peptide
  MOD_RES (20)..(20): Xaa is C or S
VNSSDDFFLVSLSSLKTPAXTPKTVH

SEQ ID NO: 10534 - protein, 24 aa, Artificial Sequence
  Cyclic GFR-binding peptide
  MOD_RES (18)..(19): Xaa is C or S
TRGVFFLISLSSLDQPVXXPSASA

SEQ ID NO: 10535 - protein, 16 aa, Artificial Sequence
  Cyclic GFR-binding peptide
  MOD_RES (14)..(15): Xaa is C or S
FFLVSLSSLKTPVXXA

SEQ ID NO: 10536 - protein, 16 aa, Artificial Sequence
  Cyclic GFR-binding peptide
VKPKRGVFFLISLSSL

SEQ ID NO: 10537 - protein, 22 aa, Artificial Sequence
  Cyclic GFR-binding peptide
  MOD_RES (16)..(17): Xaa is C or S
DDFFLVSLSSLKTPVXXAKGVK

SEQ ID NO: 10538 - protein, 16 aa, Artificial Sequence
  Cyclic GFR-binding peptide
  MOD_RES (14)..(15): Xaa is C or S
FFLVSLSSLKTPAXXP

SEQ ID NO: 10539 - protein, 16 aa, Artificial Sequence
  Cyclic GFR-binding peptide
  MOD_RES (14)..(15): Xaa is C or S
FFLVSLSSLQTPAXXP

SEQ ID NO: 10540 - protein, 20 aa, Artificial Sequence
  Cyclic GFR-binding peptide
  MOD_RES (14)..(15): Xaa is C or S
FFLVSLSSLKTPVXXAKGVK

SEQ ID NO: 10541 - protein, 18 aa, Artificial Sequence
  Cyclic GFR-binding peptide
  MOD_RES (14)..(15): Xaa is C or S
FFLISLSSLDQSVXXPSA

SEQ ID NO: 10542 - protein, 16 aa, Artificial Sequence
  Cyclic GFR-binding peptide
  MOD_RES (16)..(16): Xaa is C or S
FFLVSLSSHHVRSPQX

SEQ ID NO: 10543 - protein, 23 aa, Artificial Sequence
  Cyclic GFR-binding peptide
  MOD_RES (17)..(18): Xaa is C or S
SSDFFLVSLSSLKTPAXXAKPVA

SEQ ID NO: 10544 - protein, 14 aa, Artificial Sequence
  Cyclic GFR-binding peptide
  MOD_RES (14)..(14): Xaa is C or S
FFLVSLSSLKTPVX

SEQ ID NO: 10545 - protein, 15 aa, Artificial Sequence
  Cyclic GFR-binding peptide
TPVGMDDFFLVSLSS

SEQ ID NO: 10546 - protein, 19 aa, Artificial Sequence
  Cyclic GFR-binding peptide
IIQQKDNFFLMSLSSMKTP

SEQ ID NO: 10547 - protein, 25 aa, Artificial Sequence
  Cyclic GFR-binding peptide
  MOD_RES (19)..(20): Xaa is C or S
NSSDDFFLVSLSSLKTPAXXPKPVY

SEQ ID NO: 10548 - protein, 23 aa, Artificial Sequence
  Cyclic GFR-binding peptide
  MOD_RES (17)..(18): Xaa is C or S
GNDFFLMSLSSTKVPAXXTSPVR

SEQ ID NO: 10549 - protein, 17 aa, Artificial Sequence
  Cyclic GFR-binding peptide
  MOD_RES (14)..(15): Xaa is C or S
FFLISLSSLDQSVXXPS

SEQ ID NO: 10550 - protein, 15 aa, Artificial Sequence
  Cyclic GFR-binding peptide
  MOD_RES (14)..(15): Xaa is C or S
FFLISLSSLAQPVXX

SEQ ID NO: 10551 - protein, 16 aa, Artificial Sequence
  Cyclic GFR-binding peptide
IKPTKGIFFLISLSSL

SEQ ID NO: 10552 - protein, 27 aa, Artificial Sequence
  Cyclic GFR-binding peptide
  MOD_RES (21)..(22): Xaa is C or S
TPVGMDDFFLVSLSSLKTPVXXAKGVK

SEQ ID NO: 10553 - protein, 27 aa, Artificial Sequence
  Cyclic GFR-binding peptide
  MOD_RES (21)..(22): Xaa is C or S
VKPTRGVFFLISLSSLDQPVXXPSASA

SEQ ID NO: 10554 - protein, 15 aa, Artificial Sequence
  Cyclic GFR-binding peptide
IKPTKGIFFLISLSS

SEQ ID NO: 10555 - protein, 18 aa, Artificial Sequence
  Cyclic GFR-binding peptide
  MOD_RES (16)..(16): Xaa is C or S
FFLVSLSSHHVRSPQXKV

SEQ ID NO: 10556 - protein, 22 aa, Artificial Sequence
  Cyclic GFR-binding peptide
  MOD_RES (16)..(17): Xaa is C or S
EDFFLMSLSSLETPVXXAKPIK

SEQ ID NO: 10557 - protein, 16 aa, Artificial Sequence
  Cyclic GFR-binding peptide
IIQQKDNFFLMSLSSM

SEQ ID NO: 10558 - protein, 23 aa, Artificial Sequence
  Cyclic GFR-binding peptide
  MOD_RES (17)..(17): Xaa is C or S
KIRFFLMSLSSEETPVXELGEDN

SEQ ID NO: 10559 - protein, 19 aa, Artificial Sequence
  Cyclic GFR-binding peptide
  MOD_RES (14)..(15): Xaa is C or S
FFLISLSSLAQPVXXPAAS

SEQ ID NO: 10560 - protein, 27 aa, Artificial Sequence
  Cyclic GFR-binding peptide
  MOD_RES (21)..(22): Xaa is C or S
IVNSSDDFFLVSLSSLKTPAXXPKPVH

SEQ ID NO: 10561 - protein, 23 aa, Artificial Sequence
  Cyclic GFR-binding peptide
  MOD_RES (17)..(18): Xaa is C or S
KGIFFLISLSSLDQSVXXPSASA

SEQ ID NO: 10562 - protein, 22 aa, Artificial Sequence
  Cyclic GFR-binding peptide
  MOD_RES (16)..(17): Xaa is C or S
DDFFLVSLSSLKTPAXXPKPVY

SEQ ID NO: 10563 - protein, 17 aa, Artificial Sequence
  Cyclic GFR-binding peptide
  MOD_RES (14)..(15): Xaa is C or S
FFLISLSSLRTPVXXTP

SEQ ID NO: 10564 - protein, 26 aa, Artificial Sequence
  Cyclic GFR-binding peptide
  MOD_RES (20)..(21): Xaa is C or S
LVRGNDFFLMSLSSTKVPAXXTSPVR

SEQ ID NO: 10565 - protein, 17 aa, Artificial Sequence
  Cyclic GFR-binding peptide
  MOD_RES (14)..(15): Xaa is C or S
FFLMSLSSTKVPAXXTS

SEQ ID NO: 10566 - protein, 29 aa, Artificial Sequence
  Cyclic GFR-binding peptide
  MOD_RES (23)..(23): Xaa is C or S
HQGQHPKIRFFLMSLSSEETPVXELGEDN

SEQ ID NO: 10567 - protein, 27 aa, Artificial Sequence
  Cyclic GFR-binding peptide
  MOD_RES (21)..(22): Xaa is C or S
IVNNSSDFFLVSLSSLKTPAXXAKPVA

SEQ ID NO: 10568 - protein, 26 aa, Artificial Sequence
  Cyclic GFR-binding peptide
  MOD_RES (22)..(22): Xaa is C or S
KKRVYEFFLVSLSSHHVRSPQXKVSS

SEQ ID NO: 10569 - protein, 26 aa, Artificial Sequence
  Cyclic GFR-binding peptide
  MOD_RES (20)..(21): Xaa is C or S
VNNASDFFLISLSSLRTPVXXTPPTS

SEQ ID NO: 10570 - protein, 21 aa, Artificial Sequence
  Cyclic GFR-binding peptide
  MOD_RES (15)..(16): Xaa is C or S
DFFLVSLSSLKTPAXXPKPVH

SEQ ID NO: 10571 - protein, 15 aa, Artificial Sequence
  Cyclic GFR-binding peptide
VVNNAADFFLISLSS

SEQ ID NO: 10572 - protein, 15 aa, Artificial Sequence
  Cyclic GFR-binding peptide
  MOD_RES (14)..(15): Xaa is C or S
FFLVSLSSLKTPAXX

SEQ ID NO: 10573 - protein, 17 aa, Artificial Sequence
  Cyclic GFR-binding peptide
VKPTRGVFFLISLSSLD

SEQ ID NO: 10574 - protein, 14 aa, Artificial Sequence
  Cyclic GFR-binding peptide
  MOD_RES (14)..(14): Xaa is C or S
FFLISLSSLDQSVX

SEQ ID NO: 10575 - protein, 19 aa, Artificial Sequence
  Cyclic GFR-binding peptide
  MOD_RES (14)..(15): Xaa is C or S
FFLISLSSLRAPVXXSAPA

SEQ ID NO: 10576 - protein, 18 aa, Artificial Sequence
  Cyclic GFR-binding peptide
IIQQKDNFFLMSLSSMKT

SEQ ID NO: 10577 - protein, 13 aa, Artificial Sequence
  Cyclic GFR-binding peptide
FFLMSLSSLETPV

SEQ ID NO: 10578 - protein, 22 aa, Artificial Sequence
  Cyclic GFR-binding peptide
  MOD_RES (16)..(16): Xaa is C or S
IRFFLMSLSSEETPVXELGEDN

SEQ ID NO: 10579 - protein, 27 aa, Artificial Sequence
  Cyclic GFR-binding peptide
  MOD_RES (21)..(22): Xaa is C or S
VVKENEDFFLMSLSSLETPVXXAKPIK

SEQ ID NO: 10580 - protein, 25 aa, Artificial Sequence
  Cyclic GFR-binding peptide
  MOD_RES (19)..(20): Xaa is C or S
NSSDDFFLVSLSSLQTPAXXPKPVT

SEQ ID NO: 10581 - protein, 15 aa, Artificial Sequence
  Cyclic GFR-binding peptide
LLVRGNDFFLMSLSS

SEQ ID NO: 10582 - protein, 24 aa, Artificial Sequence
  Cyclic GFR-binding peptide
  MOD_RES (18)..(19): Xaa is C or S
DYEDFFLMSLSSLETPVXXAKPIS

SEQ ID NO: 10583 - protein, 18 aa, Artificial Sequence
  Cyclic GFR-binding peptide
  MOD_RES (14)..(15): Xaa is C or S
FFLVSLSSLKTPAXXPKP

SEQ ID NO: 10584 - protein, 21 aa, Artificial Sequence
  Cyclic GFR-binding peptide
  MOD_RES (15)..(16): Xaa is C or S
DFFLISLSSLRAPVXXSAPAA

SEQ ID NO: 10585 - protein, 21 aa, Artificial Sequence
  Cyclic GFR-binding peptide
  MOD_RES (15)..(16): Xaa is C or S
IFFLISLSSLDQSVXXPSASA

SEQ ID NO: 10586 - protein, 23 aa, Artificial Sequence
  Cyclic GFR-binding peptide
  MOD_RES (17)..(18): Xaa is C or S
SDDFFLVSLSSLQTPAXXPKPVT

SEQ ID NO: 10587 - protein, 22 aa, Artificial Sequence
  Cyclic GFR-binding peptide
  MOD_RES (16)..(16): Xaa is C or S
DDFFLVSLSSLKTPAXTPKTVH

SEQ ID NO: 10588 - protein, 14 aa, Artificial Sequence
  Cyclic GFR-binding peptide
  MOD_RES (14)..(14): Xaa is C or S
FFLISLSSLRAPVX

SEQ ID NO: 10589 - protein, 21 aa, Artificial Sequence
  Cyclic GFR-binding peptide
  MOD_RES (15)..(16): Xaa is C or S
DFFLISLSSLKTPVXXAKSAK

SEQ ID NO: 10590 - protein, 23 aa, Artificial Sequence
  Cyclic GFR-binding peptide
  MOD_RES (17)..(18): Xaa is C or S
ASDFFLISLSSLRTPVXXTPPTS

SEQ ID NO: 10591 - protein, 26 aa, Artificial Sequence
  Cyclic GFR-binding peptide
  MOD_RES (20)..(21): Xaa is C or S
VNNAADFFLISLSSLRAPVXXSAPAA

SEQ ID NO: 10592 - protein, 19 aa, Artificial Sequence
  Cyclic GFR-binding peptide
  MOD_RES (16)..(16): Xaa is C or S
FFLVSLSSHHVRSPQXKVS

SEQ ID NO: 10593 - protein, 19 aa, Artificial Sequence
  Cyclic GFR-binding peptide
  MOD_RES (14)..(15): Xaa is C or S
FFLMSLSSMKTPTXXPGAS

SEQ ID NO: 10594 - protein, 17 aa, Artificial Sequence
  Cyclic GFR-binding peptide
VVNNASDFFLISLSSLR

SEQ ID NO: 10595 - protein, 20 aa, Artificial Sequence
  Cyclic GFR-binding peptide
  MOD_RES (14)..(15): Xaa is C or S
FFLISLSSLDQPVXXPSASA

SEQ ID NO: 10596 - protein, 17 aa, Artificial Sequence
  Cyclic GFR-binding peptide
  MOD_RES (14)..(15): Xaa is C or S
FFLVSLSSLKTPAXXPK

SEQ ID NO: 10597 - protein, 17 aa, Artificial Sequence
  Cyclic GFR-binding peptide
  MOD_RES (14)..(15): Xaa is C or S
FFLISLSSLKTPVXXAK

SEQ ID NO: 10598 - protein, 13 aa, Artificial Sequence
  Cyclic GFR-binding peptide
FFLISLSSLDQPV

SEQ ID NO: 10599 - protein, 20 aa, Artificial Sequence
  Cyclic GFR-binding peptide
  MOD_RES (14)..(15): Xaa is C or S
FFLISLSSLRAPVXXSAPAA

SEQ ID NO: 10600 - protein, 15 aa, Artificial Sequence
  Cyclic GFR-binding peptide
VVKDYEDFFLMSLSS

SEQ ID NO: 10601 - protein, 21 aa, Artificial Sequence
  Cyclic GFR-binding peptide
  MOD_RES (15)..(16): Xaa is C or S
VFFLISLSSLAQPVXXPAASA

SEQ ID NO: 10602 - protein, 20 aa, Artificial Sequence
  Cyclic GFR-binding peptide
  MOD_RES (14)..(14): Xaa is C or S
FFLVSLSSLKTPAXTPKTVH

SEQ ID NO: 10603 - protein, 24 aa, Artificial Sequence
  Cyclic GFR-binding peptide
  MOD_RES (18)..(19): Xaa is C or S
NASDFFLISLSSLRTPVXXTPPTS

SEQ ID NO: 10604 - protein, 24 aa, Artificial Sequence
  Cyclic GFR-binding peptide
  MOD_RES (18)..(19): Xaa is C or S
KRGVFFLISLSSLAQPVXXPAASA

SEQ ID NO: 10605 - protein, 17 aa, Artificial Sequence
  Cyclic GFR-binding peptide
VVNNAADFFLISLSSLR

SEQ ID NO: 10606 - protein, 15 aa, Artificial Sequence
  Cyclic GFR-binding peptide
VKPKRGVFFLISLSS

SEQ ID NO: 10607 - protein, 15 aa, Artificial Sequence
  Cyclic GFR-binding peptide
IVNSSDDFFLVSLSS

SEQ ID NO: 10608 - protein, 29 aa, Artificial Sequence
  Cyclic GFR-binding peptide
  MOD_RES (25)..(25): Xaa is C or S
LKPKKRVYEFFLVSLSSHHVRSPQXKVSS

SEQ ID NO: 10609 - protein, 18 aa, Artificial Sequence
  Cyclic GFR-binding peptide
LLVRGNDFFLMSLSSTKV

SEQ ID NO: 10610 - protein, 20 aa, Artificial Sequence
  Cyclic GFR-binding peptide
  MOD_RES (16)..(16): Xaa is C or S
FFLVSLSSHHVRSPQXKVSS

SEQ ID NO: 10611 - protein, 15 aa, Artificial Sequence
  Cyclic GFR-binding peptide
  MOD_RES (14)..(15): Xaa is C or S
FFLISLSSLDQPVXX

SEQ ID NO: 10612 - protein, 23 aa, Artificial Sequence
  Cyclic GFR-binding peptide
  MOD_RES (17)..(18): Xaa is C or S
RGVFFLISLSSLDQPVXXPSASA

SEQ ID NO: 10613 - protein, 27 aa, Artificial Sequence
  Cyclic GFR-binding peptide
  MOD_RES (21)..(22): Xaa is C or S
IKPTKGIFFLISLSSLDQSVXXPSASA

SEQ ID NO: 10614 - protein, 25 aa, Artificial Sequence
  Cyclic GFR-binding peptide
  MOD_RES (19)..(20): Xaa is C or S
KDYEDFFLMSLSSLETPVXXAKPIS

SEQ ID NO: 10615 - protein, 16 aa, Artificial Sequence
  Cyclic GFR-binding peptide
IVNNSSDFFLVSLSSL

SEQ ID NO: 10616 - protein, 26 aa, Artificial Sequence
  Cyclic GFR-binding peptide
  MOD_RES (20)..(21): Xaa is C or S
VNSSDDFFLVSLSSLQTPAXXPKPVT

SEQ ID NO: 10617 - protein, 26 aa, Artificial Sequence
  Cyclic GFR-binding peptide
  MOD_RES (20)..(21): Xaa is C or S
KPTRGVFFLISLSSLDQPVXXPSASA

SEQ ID NO: 10618 - protein, 17 aa, Artificial Sequence
  Cyclic GFR-binding peptide
VKPKRGVFFLISLSSLA

SEQ ID NO: 10619 - protein, 19 aa, Artificial Sequence
  Cyclic GFR-binding peptide
IVNSSDDFFLVSLSSLKTP

SEQ ID NO: 10620 - protein, 18 aa, Artificial Sequence
  Cyclic GFR-binding peptide
VVNNASDFFLISLSSLRT

SEQ ID NO: 10621 - protein, 16 aa, Artificial Sequence
  Cyclic GFR-binding peptide
YTVVGKDFFLISLSSL

SEQ ID NO: 10622 - protein, 21 aa, Artificial Sequence
  Cyclic GFR-binding peptide
  MOD_RES (15)..(16): Xaa is C or S
DFFLVSLSSLKTPAXXAKPVA

SEQ ID NO: 10623 - protein, 20 aa, Artificial Sequence
  Cyclic GFR-binding peptide
  MOD_RES (14)..(15): Xaa is C or S
FFLISLSSLRTPVXXTPPTS

SEQ ID NO: 10624 - protein, 18 aa, Artificial Sequence
  Cyclic GFR-binding peptide
VVNNAADFFLISLSSLRA

SEQ ID NO: 10625 - protein, 25 aa, Artificial Sequence
  Cyclic GFR-binding peptide
  MOD_RES (19)..(20): Xaa is C or S
QQKDNFFLMSLSSMKTPTXXPGASG

SEQ ID NO: 10626 - protein, 19 aa, Artificial Sequence
  Cyclic GFR-binding peptide
  MOD_RES (14)..(15): Xaa is C or S
FFLVSLSSLKTPVXXAKGV

SEQ ID NO: 10627 - protein, 23 aa, Artificial Sequence
  Cyclic GFR-binding peptide
  MOD_RES (17)..(18): Xaa is C or S
NEDFFLMSLSSLETPVXXAKPIK

SEQ ID NO: 10628 - protein, 18 aa, Artificial Sequence
  Cyclic GFR-binding peptide
  MOD_RES (14)..(14): Xaa is C or S
FFLVSLSSLKTPAXTPKT

SEQ ID NO: 10629 - protein, 25 aa, Artificial Sequence
  Cyclic GFR-binding peptide
  MOD_RES (19)..(20): Xaa is C or S
PKRGVFFLISLSSLAQPVXXPAASA

SEQ ID NO: 10630 - protein, 20 aa, Artificial Sequence
  Cyclic GFR-binding peptide
  MOD_RES (14)..(14): Xaa is C or S
FFLMSLSSEETPVXELGEDN

SEQ ID NO: 10631 - protein, 19 aa, Artificial Sequence
  Cyclic GFR-binding peptide
VKPTRGVFFLISLSSLDQP

SEQ ID NO: 10632 - protein, 19 aa, Artificial Sequence
  Cyclic GFR-binding peptide
VVKDYEDFFLMSLSSLETP

SEQ ID NO: 10633 - protein, 17 aa, Artificial Sequence
  Cyclic GFR-binding peptide
  MOD_RES (16)..(16): Xaa is C or S
FFLVSLSSHHVRSPQXK

SEQ ID NO: 10634 - protein, 26 aa, Artificial Sequence
  Cyclic GFR-binding peptide
  MOD_RES (20)..(21): Xaa is C or S
IQQKDNFFLMSLSSMKTPTXXPGASG

SEQ ID NO: 10635 - protein, 13 aa, Artificial Sequence
  Cyclic GFR-binding peptide
FFLISLSSLAQPV

SEQ ID NO: 10636 - protein, 22 aa, Artificial Sequence
  Cyclic GFR-binding peptide
  MOD_RES (16)..(17): Xaa is C or S
DDFFLVSLSSLQTPAXXPKPVT

SEQ ID NO: 10637 - protein, 19 aa, Artificial Sequence
  Cyclic GFR-binding peptide
YTVVGKDFFLISLSSLKTP

SEQ ID NO: 10638 - protein, 25 aa, Artificial Sequence
  Cyclic GFR-binding peptide
  MOD_RES (19)..(20): Xaa is C or S
VRGNDFFLMSLSSTKVPAXXTSPVR

SEQ ID NO: 10639 - protein, 19 aa, Artificial Sequence
  Cyclic GFR-binding peptide
IVNSSDDFFLVSLSSLQTP

SEQ ID NO: 10640 - protein, 16 aa, Artificial Sequence
  Cyclic GFR-binding peptide
  MOD_RES (14)..(15): Xaa is C or S
FFLISLSSLDQPVXXP

SEQ ID NO: 10641 - protein, 16 aa, Artificial Sequence
  Cyclic GFR-binding peptide
LLVRGNDFFLMSLSST

SEQ ID NO: 10642 - protein, 15 aa, Artificial Sequence
  Cyclic GFR-binding peptide
VVKENEDFFLMSLSS

SEQ ID NO: 10643 - protein, 17 aa, Artificial Sequence
  Cyclic GFR-binding peptide
HQGQHPKIRFFLMSLSS

SEQ ID NO: 10644 - protein, 15 aa, Artificial Sequence
  Cyclic GFR-binding peptide
  MOD_RES (14)..(15): Xaa is C or S
FFLISLSSLRAPVXX

SEQ ID NO: 10645 - protein, 22 aa, Artificial Sequence
  Cyclic GFR-binding peptide
  MOD_RES (16)..(17): Xaa is C or S
GVFFLISLSSLAQPVXXPAASA

SEQ ID NO: 10646 - protein, 18 aa, Artificial Sequence
  Cyclic GFR-binding peptide
  MOD_RES (14)..(15): Xaa is C or S
FFLMSLSSMKTPTXXPGA

SEQ ID NO: 10647 - protein, 19 aa, Artificial Sequence
  Cyclic GFR-binding peptide
IVNNSSDFFLVSLSSLKTP

SEQ ID NO: 10648 - protein, 13 aa, Artificial Sequence
  Cyclic GFR-binding peptide
FFLISLSSLKTPV

SEQ ID NO: 10649 - protein, 26 aa, Artificial Sequence
  Cyclic GFR-binding peptide
  MOD_RES (20)..(20): Xaa is C or S
QHPKIRFFLMSLSSEETPVXELGEDN

SEQ ID NO: 10650 - protein, 21 aa, Artificial Sequence
  Cyclic GFR-binding peptide
  MOD_RES (15)..(16): Xaa is C or S
DFFLMSLSSLETPVXXAKPIK

SEQ ID NO: 10651 - protein, 15 aa, Artificial Sequence
  Cyclic GFR-binding peptide
  MOD_RES (14)..(15): Xaa is C or S
FFLMSLSSLETPVXX

SEQ ID NO: 10652 - protein, 25 aa, Artificial Sequence
  Cyclic GFR-binding peptide
  MOD_RES (19)..(20): Xaa is C or S
NSSDDFFLVSLSSLKTPAXXPKPVH

SEQ ID NO: 10653 - protein, 18 aa, Artificial Sequence
  Cyclic GFR-binding peptide
IKPTKGIFFLISLSSLDQ

SEQ ID NO: 10654 - protein, 16 aa, Artificial Sequence
  Cyclic GFR-binding peptide
  MOD_RES (14)..(15): Xaa is C or S
FFLMSLSSMKTPTXXP

SEQ ID NO: 10655 - protein, 16 aa, Artificial Sequence
  Cyclic GFR-binding peptide
VVKDYEDFFLMSLSSL

SEQ ID NO: 10656 - protein, 13 aa, Artificial Sequence
  Cyclic GFR-binding peptide
FFLVSLSSLQTPA

SEQ ID NO: 10657 - protein, 18 aa, Artificial Sequence
  Cyclic GFR-binding peptide
  MOD_RES (14)..(15): Xaa is C or S
FFLISLSSLRTPVXXTPP

SEQ ID NO: 10658 - protein, 26 aa, Artificial Sequence
  Cyclic GFR-binding peptide
  MOD_RES (20)..(21): Xaa is C or S
PVGMDDFFLVSLSSLKTPVXXAKGVK

SEQ ID NO: 10659 - protein, 16 aa, Artificial Sequence
  Cyclic GFR-binding peptide
  MOD_RES (14)..(14): Xaa is C or S
FFLVSLSSLKTPAXTP

SEQ ID NO: 10660 - protein, 19 aa, Artificial Sequence
  Cyclic GFR-binding peptide
TPVGMDDFFLVSLSSLKTP

SEQ ID NO: 10661 - protein, 15 aa, Artificial Sequence
  Cyclic GFR-binding peptide
  MOD_RES (14)..(15): Xaa is C or S
FFLVSLSSLKTPVXX

SEQ ID NO: 10662 - protein, 20 aa, Artificial Sequence
  Cyclic GFR-binding peptide
  MOD_RES (14)..(15): Xaa is C or S
FFLMSLSSMKTPTXXPGASG

SEQ ID NO: 10663 - protein, 26 aa, Artificial Sequence
  Cyclic GFR-binding peptide
  MOD_RES (20)..(21): Xaa is C or S
KPTKGIFFLISLSSLDQSVXXPSASA

SEQ ID NO: 10664 - protein, 22 aa, Artificial Sequence
  Cyclic GFR-binding peptide
  MOD_RES (16)..(17): Xaa is C or S
KDFFLISLSSLKTPVXXAKSAK

SEQ ID NO: 10665 - protein, 13 aa, Artificial Sequence
  Cyclic GFR-binding peptide
FFLVSLSSHHVRS

SEQ ID NO: 10666 - protein, 18 aa, Artificial Sequence
  Cyclic GFR-binding peptide
  MOD_RES (14)..(15): Xaa is C or S
FFLISLSSLKTPVXXAKS

SEQ ID NO: 10667 - protein, 25 aa, Artificial Sequence
  Cyclic GFR-binding peptide
  MOD_RES (21)..(21): Xaa is C or S
KRVYEFFLVSLSSHHVRSPQXKVSS

SEQ ID NO: 10668 - protein, 16 aa, Artificial Sequence
  Cyclic GFR-binding peptide
  MOD_RES (14)..(15): Xaa is C or S
FFLISLSSLKTPVXXA

SEQ ID NO: 10669 - protein, 17 aa, Artificial Sequence
  Cyclic GFR-binding peptide
  MOD_RES (14)..(15): Xaa is C or S
FFLVSLSSLQTPAXXPK

SEQ ID NO: 10670 - protein, 17 aa, Artificial Sequence
  Cyclic GFR-binding peptide
  MOD_RES (14)..(15): Xaa is C or S
FFLVSLSSLKTPAXXAK

SEQ ID NO: 10671 - protein, 26 aa, Artificial Sequence
  Cyclic GFR-binding peptide
  MOD_RES (20)..(21): Xaa is C or S
VNNSSDFFLVSLSSLKTPAXXAKPVA

SEQ ID NO: 10672 - protein, 23 aa, Artificial Sequence
  Cyclic GFR-binding peptide
  MOD_RES (17)..(17): Xaa is C or S
SDDFFLVSLSSLKTPAXTPKTVH

SEQ ID NO: 10673 - protein, 13 aa, Artificial Sequence
  Cyclic GFR-binding peptide
FFLISLSSLRTPV

SEQ ID NO: 10674 - protein, 15 aa, Artificial Sequence
  Cyclic GFR-binding peptide
  MOD_RES (14)..(15): Xaa is C or S
FFLMSLSSMKTPTXX

SEQ ID NO: 10675 - protein, 27 aa, Artificial Sequence
  Cyclic GFR-binding peptide
  MOD_RES (21)..(22): Xaa is C or S
VVKDYEDFFLMSLSSLETPVXXAKPIS

SEQ ID NO: 10676 - protein, 20 aa, Artificial Sequence
  Cyclic GFR-binding peptide
  MOD_RES (14)..(15): Xaa is C or S
FFLMSLSSLETPVXXAKPIK

SEQ ID NO: 10677 - protein, 13 aa, Artificial Sequence
  Cyclic GFR-binding peptide
FFLMSLSSMKTPT

SEQ ID NO: 10678 - protein, 16 aa, Artificial Sequence
  Cyclic GFR-binding peptide
IVNSSDDFFLVSLSSL

SEQ ID NO: 10679 - protein, 14 aa, Artificial Sequence
  Cyclic GFR-binding peptide
  MOD_RES (14)..(14): Xaa is C or S
FFLMSLSSEETPVX

SEQ ID NO: 10680 - protein, 17 aa, Artificial Sequence
  Cyclic GFR-binding peptide
  MOD_RES (14)..(15): Xaa is C or S
FFLMSLSSMKTPTXXPG

SEQ ID NO: 10681 - protein, 20 aa, Artificial Sequence
  Cyclic GFR-binding peptide
  MOD_RES (14)..(15): Xaa is C or S
FFLVSLSSLQTPAXXPKPVT

SEQ ID NO: 10682 - protein, 18 aa, Artificial Sequence
  Cyclic GFR-binding peptide
VVKENEDFFLMSLSSLET

SEQ ID NO: 10683 - protein, 23 aa, Artificial Sequence
  Cyclic GFR-binding peptide
  MOD_RES (19)..(19): Xaa is C or S
VYEFFLVSLSSHHVRSPQXKVSS

SEQ ID NO: 10684 - protein, 18 aa, Artificial Sequence
  Cyclic GFR-binding peptide
  MOD_RES (14)..(15): Xaa is C or S
FFLISLSSLDQPVXXPSA

SEQ ID NO: 10685 - protein, 17 aa, Artificial Sequence
  Cyclic GFR-binding peptide
YTVVGKDFFLISLSSLK

SEQ ID NO: 10686 - protein, 26 aa, Artificial Sequence
  Cyclic GFR-binding peptide
  MOD_RES (20)..(21): Xaa is C or S
VNSSDDFFLVSLSSLKTPAXXPKPVH

SEQ ID NO: 10687 - protein, 21 aa, Artificial Sequence
  Cyclic GFR-binding peptide
  MOD_RES (15)..(15): Xaa is C or S
RFFLMSLSSEETPVXELGEDN

SEQ ID NO: 10688 - protein, 23 aa, Artificial Sequence
  Cyclic GFR-binding peptide
  MOD_RES (17)..(18): Xaa is C or S
YEDFFLMSLSSLETPVXXAKPIS

SEQ ID NO: 10689 - protein, 21 aa, Artificial Sequence
  Cyclic GFR-binding peptide
  MOD_RES (15)..(16): Xaa is C or S
DFFLMSLSSTKVPAXXTSPVR

SEQ ID NO: 10690 - protein, 24 aa, Artificial Sequence
  Cyclic GFR-binding peptide
  MOD_RES (18)..(19): Xaa is C or S
QKDNFFLMSLSSMKTPTXXPGASG

SEQ ID NO: 10691 - protein, 20 aa, Artificial Sequence
  Cyclic GFR-binding peptide
  MOD_RES (14)..(15): Xaa is C or S
FFLMSLSSTKVPAXXTSPVR

SEQ ID NO: 10692 - protein, 13 aa, Artificial Sequence
  Cyclic GFR-binding peptide
FFLISLSSLDQSV

SEQ ID NO: 10693 - protein, 27 aa, Artificial Sequence
  Cyclic GFR-binding peptide
  MOD_RES (21)..(22): Xaa is C or S
VVNNASDFFLISLSSLRTPVXXTPPTS

SEQ ID NO: 10694 - protein, 24 aa, Artificial Sequence
  Cyclic GFR-binding peptide
  MOD_RES (18)..(19): Xaa is C or S
NAADFFLISLSSLRAPVXXSAPAA

SEQ ID NO: 10695 - protein, 17 aa, Artificial Sequence
  Cyclic GFR-binding peptide
  MOD_RES (14)..(14): Xaa is C or S
FFLVSLSSLKTPAXTPK

SEQ ID NO: 10696 - protein, 19 aa, Artificial Sequence
  Cyclic GFR-binding peptide
IKPTKGIFFLISLSSLDQS

SEQ ID NO: 10697 - protein, 19 aa, Artificial Sequence
  Cyclic GFR-binding peptide
  MOD_RES (14)..(14): Xaa is C or S
FFLVSLSSLKTPAXTPKTV

SEQ ID NO: 10698 - protein, 18 aa, Artificial Sequence
  Cyclic GFR-binding peptide
  MOD_RES (14)..(15): Xaa is C or S
FFLISLSSLRAPVXXSAP

SEQ ID NO: 10699 - protein, 16 aa, Artificial Sequence
  Cyclic GFR-binding peptide
  MOD_RES (14)..(15): Xaa is C or S
FFLISLSSLRTPVXXT

SEQ ID NO: 10700 - protein, 18 aa, Artificial Sequence
  Cyclic GFR-binding peptide
  MOD_RES (14)..(15): Xaa is C or S
FFLMSLSSLETPVXXAKP

SEQ ID NO: 10701 - protein, 17 aa, Artificial Sequence
  Cyclic GFR-binding peptide
  MOD_RES (14)..(15): Xaa is C or S
FFLISLSSLRAPVXXSA

SEQ ID NO: 10702 - protein, 23 aa, Artificial Sequence
  Cyclic GFR-binding peptide
  MOD_RES (17)..(18): Xaa is C or S
GKDFFLISLSSLKTPVXXAKSAK

SEQ ID NO: 10703 - protein, 17 aa, Artificial Sequence
  Cyclic GFR-binding peptide
IVNNSSDFFLVSLSSLK

SEQ ID NO: 10704 - protein, 28 aa, Artificial Sequence
  Cyclic GFR-binding peptide
  MOD_RES (24)..(24): Xaa is C or S
KPKKRVYEFFLVSLSSHHVRSPQXKVSS

SEQ ID NO: 10705 - protein, 17 aa, Artificial Sequence
  Cyclic GFR-binding peptide
  MOD_RES (14)..(15): Xaa is C or S
FFLISLSSLAQPVXXPA

SEQ ID NO: 10706 - protein, 23 aa, Artificial Sequence
  Cyclic GFR-binding peptide
  MOD_RES (17)..(18): Xaa is C or S
MDDFFLVSLSSLKTPVXXAKGVK

SEQ ID NO: 10707 - protein, 22 aa, Artificial Sequence
  Cyclic GFR-binding peptide
  MOD_RES (16)..(17): Xaa is C or S
EDFFLMSLSSLETPVXXAKPIS

SEQ ID NO: 10708 - protein, 21 aa, Artificial Sequence
  Cyclic GFR-binding peptide
  MOD_RES (15)..(16): Xaa is C or S
DFFLMSLSSLETPVXXAKPIS

SEQ ID NO: 10709 - protein, 27 aa, Artificial Sequence
  Cyclic GFR-binding peptide
  MOD_RES (21)..(22): Xaa is C or S
IIQQKDNFFLMSLSSMKTPTXXPGASG

SEQ ID NO: 10710 - protein, 21 aa, Artificial Sequence
  Cyclic GFR-binding peptide
HQGQHPKIRFFLMSLSSEETP

SEQ ID NO: 10711 - protein, 19 aa, Artificial Sequence
  Cyclic GFR-binding peptide
  MOD_RES (14)..(15): Xaa is C or S
FFLMSLSSLETPVXXAKPI

SEQ ID NO: 10712 - protein, 19 aa, Artificial Sequence
  Cyclic GFR-binding peptide
  MOD_RES (14)..(15): Xaa is C or S
FFLMSLSSTKVPAXXTSPV

SEQ ID NO: 10713 - protein, 15 aa, Artificial Sequence
  Cyclic GFR-binding peptide
  MOD_RES (14)..(15): Xaa is C or S
FFLVSLSSLQTPAXX

SEQ ID NO: 10714 - protein, 27 aa, Artificial Sequence
  Cyclic GFR-binding peptide
  MOD_RES (21)..(22): Xaa is C or S
IVNSSDDFFLVSLSSLKTPAXXPKPVY

SEQ ID NO: 10715 - protein, 17 aa, Artificial Sequence
  Cyclic GFR-binding peptide
LLVRGNDFFLMSLSSTK

SEQ ID NO: 10716 - protein, 17 aa, Artificial Sequence
  Cyclic GFR-binding peptide
IKPTKGIFFLISLSSLD

SEQ ID NO: 10717 - protein, 15 aa, Artificial Sequence
  Cyclic GFR-binding peptide
IIQQKDNFFLMSLSS

SEQ ID NO: 10718 - protein, 13 aa, Artificial Sequence
  Cyclic GFR-binding peptide
FFLISLSSLRAPV

SEQ ID NO: 10719 - protein, 14 aa, Artificial Sequence
  Cyclic GFR-binding peptide
  MOD_RES (14)..(14): Xaa is C or S
FFLISLSSLRTPVX

SEQ ID NO: 10720 - protein, 15 aa, Artificial Sequence
  Cyclic GFR-binding peptide
  MOD_RES (14)..(15): Xaa is C or S
FFLISLSSLKTPVXX

SEQ ID NO: 10721 - protein, 20 aa, Artificial Sequence
  Cyclic GFR-binding peptide
  MOD_RES (14)..(15): Xaa is C or S
FFLISLSSLKTPVXXAKSAK

SEQ ID NO: 10722 - protein, 20 aa, Artificial Sequence
  Cyclic GFR-binding peptide
  MOD_RES (14)..(15): Xaa is C or S
FFLVSLSSLKTPAXXPKPVH

SEQ ID NO: 10723 - protein, 16 aa, Artificial Sequence
  Cyclic GFR-binding peptide
VVNNAADFFLISLSSL

SEQ ID NO: 10724 - protein, 22 aa, Artificial Sequence
  Cyclic GFR-binding peptide
  MOD_RES (16)..(17): Xaa is C or S
SDFFLVSLSSLKTPAXXAKPVA

SEQ ID NO: 10725 - protein, 16 aa, Artificial Sequence
  Cyclic GFR-binding peptide
VKPTRGVFFLISLSSL

SEQ ID NO: 10726 - protein, 25 aa, Artificial Sequence
  Cyclic GFR-binding peptide
  MOD_RES (19)..(20): Xaa is C or S
VGMDDFFLVSLSSLKTPVXXAKGVK

SEQ ID NO: 10727 - protein, 21 aa, Artificial Sequence
  Cyclic GFR-binding peptide
  MOD_RES (15)..(16): Xaa is C or S
DFFLVSLSSLKTPVXXAKGVK

SEQ ID NO: 10728 - protein, 19 aa, Artificial Sequence
  Cyclic GFR-binding peptide
  MOD_RES (14)..(15): Xaa is C or S
FFLISLSSLDQSVXXPSAS

SEQ ID NO: 10729 - protein, 16 aa, Artificial Sequence
  Cyclic GFR-binding peptide
  MOD_RES (14)..(15): Xaa is C or S
FFLVSLSSLKTPAXXA

SEQ ID NO: 10730 - protein, 24 aa, Artificial Sequence
  Cyclic GFR-binding peptide
  MOD_RES (18)..(19): Xaa is C or S
ENEDFFLMSLSSLETPVXXAKPIK

SEQ ID NO: 10731 - protein, 25 aa, Artificial Sequence
  Cyclic GFR-binding peptide
  MOD_RES (19)..(20): Xaa is C or S
PTRGVFFLISLSSLDQPVXXPSASA

SEQ ID NO: 10732 - protein, 22 aa, Artificial Sequence
  Cyclic GFR-binding peptide
  MOD_RES (16)..(17): Xaa is C or S
NDFFLMSLSSTKVPAXXTSPVR

SEQ ID NO: 10733 - protein, 23 aa, Artificial Sequence
  Cyclic GFR-binding peptide
  MOD_RES (17)..(18): Xaa is C or S
RGVFFLISLSSLAQPVXXPAASA

SEQ ID NO: 10734 - protein, 16 aa, Artificial Sequence
  Cyclic GFR-binding peptide
VVKENEDFFLMSLSSL

SEQ ID NO: 10735 - protein, 18 aa, Artificial Sequence
  Cyclic GFR-binding peptide
LKPKKRVYEFFLVSLSSH

SEQ ID NO: 10736 - protein, 26 aa, Artificial Sequence
  Cyclic GFR-binding peptide
  MOD_RES (20)..(21): Xaa is C or S
VKENEDFFLMSLSSLETPVXXAKPIK

SEQ ID NO: 10737 - protein, 19 aa, Artificial Sequence
  Cyclic GFR-binding peptide
  MOD_RES (14)..(15): Xaa is C or S
FFLVSLSSLKTPAXXPKPV

SEQ ID NO: 10738 - protein, 17 aa, Artificial Sequence
  Cyclic GFR-binding peptide
  MOD_RES (14)..(15): Xaa is C or S
FFLVSLSSLKTPVXXAK

SEQ ID NO: 10739 - protein, 19 aa, Artificial Sequence
  Cyclic GFR-binding peptide
  MOD_RES (14)..(14): Xaa is C or S
FFLMSLSSEETPVXELGED

SEQ ID NO: 10740 - protein, 14 aa, Artificial Sequence
  Cyclic GFR-binding peptide
  MOD_RES (14)..(14): Xaa is C or S
FFLVSLSSLKTPAX

SEQ ID NO: 10741 - protein, 17 aa, Artificial Sequence
  Cyclic GFR-binding peptide
VVKENEDFFLMSLSSLE

SEQ ID NO: 10742 - protein, 27 aa, Artificial Sequence
  Cyclic GFR-binding peptide
  MOD_RES (21)..(22): Xaa is C or S
YTVVGKDFFLISLSSLKTPVXXAKSAK

SEQ ID NO: 10743 - protein, 24 aa, Artificial Sequence
  Cyclic GFR-binding peptide
  MOD_RES (18)..(19): Xaa is C or S
TKGIFFLISLSSLDQSVXXPSASA

SEQ ID NO: 10744 - protein, 18 aa, Artificial Sequence
  Cyclic GFR-binding peptide
  MOD_RES (14)..(15): Xaa is C or S
FFLVSLSSLKTPVXXAKG

SEQ ID NO: 10745 - protein, 27 aa, Artificial Sequence
  Cyclic GFR-binding peptide
  MOD_RES (21)..(22): Xaa is C or S
VKPKRGVFFLISLSSLAQPVXXPAASA

SEQ ID NO: 10746 - protein, 20 aa, Artificial Sequence
  Cyclic GFR-binding peptide
  MOD_RES (14)..(15): Xaa is C or S
FFLISLSSLDQSVXXPSASA

SEQ ID NO: 10747 - protein, 24 aa, Artificial Sequence
  Cyclic GFR-binding peptide
  MOD_RES (18)..(19): Xaa is C or S
SSDDFFLVSLSSLKTPAXXPKPVH

SEQ ID NO: 10748 - protein, 18 aa, Artificial Sequence
  Cyclic GFR-binding peptide
TPVGMDDFFLVSLSSLKT

SEQ ID NO: 10749 - protein, 26 aa, Artificial Sequence
  Cyclic GFR-binding peptide
  MOD_RES (20)..(21): Xaa is C or S
KPKRGVFFLISLSSLAQPVXXPAASA

SEQ ID NO: 10750 - protein, 16 aa, Artificial Sequence
  Cyclic GFR-binding peptide
VVNNASDFFLISLSSL

SEQ ID NO: 10751 - protein, 13 aa, Artificial Sequence
  Cyclic GFR-binding peptide
FFLMSLSSEETPV

SEQ ID NO: 10752 - protein, 18 aa, Artificial Sequence
  Cyclic GFR-binding peptide
VKPKRGVFFLISLSSLAQ

SEQ ID NO: 10753 - protein, 22 aa, Artificial Sequence
  Cyclic GFR-binding peptide
  MOD_RES (16)..(17): Xaa is C or S
DDFFLVSLSSLKTPAXXPKPVH

SEQ ID NO: 10754 - protein, 25 aa, Artificial Sequence
  Cyclic GFR-binding peptide
  MOD_RES (19)..(19): Xaa is C or S
HPKIRFFLMSLSSEETPVXELGEDN

SEQ ID NO: 10755 - protein, 17 aa, Artificial Sequence
  Cyclic GFR-binding peptide
  MOD_RES (14)..(15): Xaa is C or S
FFLMSLSSLETPVXXAK

SEQ ID NO: 10756 - protein, 21 aa, Artificial Sequence
  Cyclic GFR-binding peptide
  MOD_RES (15)..(15): Xaa is C or S
DFFLVSLSSLKTPAXTPKTVH

SEQ ID NO: 10757 - protein, 16 aa, Artificial Sequence
  Cyclic GFR-binding peptide
TPVGMDDFFLVSLSSL

SEQ ID NO: 10758 - protein, 16 aa, Artificial Sequence
  Cyclic GFR-binding peptide
  MOD_RES (14)..(15): Xaa is C or S
FFLISLSSLAQPVXXP

SEQ ID NO: 10759 - protein, 20 aa, Artificial Sequence
  Cyclic GFR-binding peptide
  MOD_RES (14)..(15): Xaa is C or S
FFLVSLSSLKTPAXXAKPVA

SEQ ID NO: 10760 - protein, 19 aa, Artificial Sequence
  Cyclic GFR-binding peptide
  MOD_RES (14)..(15): Xaa is C or S
FFLISLSSLRTPVXXTPPT

SEQ ID NO: 10761 - protein, 21 aa, Artificial Sequence
  Cyclic GFR-binding peptide
  MOD_RES (17)..(17): Xaa is C or S
EFFLVSLSSHHVRSPQXKVSS

SEQ ID NO: 10762 - protein, 19 aa, Artificial Sequence
  Cyclic GFR-binding peptide
  MOD_RES (14)..(15): Xaa is C or S
FFLISLSSLKTPVXXAKSA

SEQ ID NO: 10763 - protein, 15 aa, Artificial Sequence
  Cyclic GFR-binding peptide
IVNNSSDFFLVSLSS

SEQ ID NO: 10764 - protein, 25 aa, Artificial Sequence
  Cyclic GFR-binding peptide
  MOD_RES (19)..(20): Xaa is C or S
KENEDFFLMSLSSLETPVXXAKPIK

SEQ ID NO: 10765 - protein, 15 aa, Artificial Sequence
  Cyclic GFR-binding peptide
  MOD_RES (14)..(14): Xaa is C or S
FFLMSLSSEETPVXE

SEQ ID NO: 10766 - protein, 21 aa, Artificial Sequence
  Cyclic GFR-binding peptide
  MOD_RES (15)..(16): Xaa is C or S
VFFLISLSSLDQPVXXPSASA

SEQ ID NO: 10767 - protein, 21 aa, Artificial Sequence
  Cyclic GFR-binding peptide
  MOD_RES (15)..(16): Xaa is C or S
DFFLVSLSSLQTPAXXPKPVT

SEQ ID NO: 10768 - protein, 21 aa, Artificial Sequence
  Cyclic GFR-binding peptide
  MOD_RES (15)..(16): Xaa is C or S
NFFLMSLSSMKTPTXXPGASG

SEQ ID NO: 10769 - protein, 26 aa, Artificial Sequence
  Cyclic GFR-binding peptide
  MOD_RES (20)..(21): Xaa is C or S
VKDYEDFFLMSLSSLETPVXXAKPIS

SEQ ID NO: 10770 - protein, 14 aa, Artificial Sequence
  Cyclic GFR-binding peptide
  MOD_RES (14)..(14): Xaa is C or S
FFLMSLSSTKVPAX

SEQ ID NO: 10771 - protein, 17 aa, Artificial Sequence
  Cyclic GFR-binding peptide
  MOD_RES (14)..(15): Xaa is C or S
FFLISLSSLDQPVXXPS

SEQ ID NO: 10772 - protein, 23 aa, Artificial Sequence
  Cyclic GFR-binding peptide
  MOD_RES (6)..(7): Xaa is C or S
HVPKPXXAPTKLSSLSVLFFDDS

SEQ ID NO: 10773 - protein, 18 aa, Artificial Sequence
  Cyclic GFR-binding peptide
TKLSSLSVLFFDDSSNVI

SEQ ID NO: 10774 - protein, 27 aa, Artificial Sequence
  Cyclic GFR-binding peptide
  MOD_RES (7)..(7): Xaa is C or S
HVTKPTXAPTKLSSLSVLFFDDSSNVI

SEQ ID NO: 10775 - protein, 15 aa, Artificial Sequence
  Cyclic GFR-binding peptide
  MOD_RES (2)..(2): Xaa is C or S
TXAPTKLSSLSVLFF

SEQ ID NO: 10776 - protein, 20 aa, Artificial Sequence
  Cyclic GFR-binding peptide
  MOD_RES (6)..(7): Xaa is C or S
YVPKPXXAPTKLSSLSVLFF

SEQ ID NO: 10777 - protein, 25 aa, Artificial Sequence
  Cyclic GFR-binding peptide
  MOD_RES (6)..(7): Xaa is C or S
AVPKAXXAPTKLSSLSVLFFDSSNN

SEQ ID NO: 10778 - protein, 23 aa, Artificial Sequence
  Cyclic GFR-binding peptide
  MOD_RES (6)..(7): Xaa is C or S
GSAGPXXTPTKMSSLSMLFFNDK

SEQ ID NO: 10779 - protein, 24 aa, Artificial Sequence
  Cyclic GFR-binding peptide
  MOD_RES (6)..(7): Xaa is C or S
TVPKPXXAPTQLSSLSVLFFDDSS

SEQ ID NO: 10780 - protein, 20 aa, Artificial Sequence
  Cyclic GFR-binding peptide
  MOD_RES (6)..(7): Xaa is C or S
ASAAPXXVPQALSSLSILFF

SEQ ID NO: 10781 - protein, 25 aa, Artificial Sequence
  Cyclic GFR-binding peptide
  MOD_RES (6)..(7): Xaa is C or S
STPPTXXVPTRLSSLSILFFDSANN

SEQ ID NO: 10782 - protein, 15 aa, Artificial Sequence
  Cyclic GFR-binding peptide
SSLSILFFDKGVVTY

SEQ ID NO: 10783 - protein, 18 aa, Artificial Sequence
  Cyclic GFR-binding peptide
  MOD_RES (5)..(5): Xaa is C or S
EGLEXVPTEESSLSMLFF

SEQ ID NO: 10784 - protein, 19 aa, Artificial Sequence
  Cyclic GFR-binding peptide
  MOD_RES (5)..(6): Xaa is C or S
VPKAXXAPTKLSSLSVLFF

SEQ ID NO: 10785 - protein, 15 aa, Artificial Sequence
  Cyclic GFR-binding peptide
SSLSILFFDSANNVV

SEQ ID NO: 10786 - protein, 15 aa, Artificial Sequence
  Cyclic GFR-binding peptide
  MOD_RES (1)..(2): Xaa is C or S
XXVSQDLSSLSILFF

SEQ ID NO: 10787 - protein, 19 aa, Artificial Sequence
  Cyclic GFR-binding peptide
EESSLSMLFFRIKPHQGQH

SEQ ID NO: 10788 - protein, 17 aa, Artificial Sequence
  Cyclic GFR-binding peptide
KLSSLSVLFFDDMGVPT

SEQ ID NO: 10789 - protein, 14 aa, Artificial Sequence
  Cyclic GFR-binding peptide
  MOD_RES (1)..(1): Xaa is C or S
XTPTKMSSLSMLFF

SEQ ID NO: 10790 - protein, 18 aa, Artificial Sequence
  Cyclic GFR-binding peptide
TELSSLSMLFFDEYDKVV

SEQ ID NO: 10791 - protein, 13 aa, Artificial Sequence
  Cyclic GFR-binding peptide
APVKTSSLSMLFF

SEQ ID NO: 10792 - protein, 26 aa, Artificial Sequence
  Cyclic GFR-binding peptide
  MOD_RES (6)..(7): Xaa is C or S
YVPKPXXAPTKLSSLSVLFFDDSSNV

SEQ ID NO: 10793 - protein, 18 aa, Artificial Sequence
  Cyclic GFR-binding peptide
ESSLSMLFFRIKPHQGQH

SEQ ID NO: 10794 - protein, 18 aa, Artificial Sequence
  Cyclic GFR-binding peptide
  MOD_RES (4)..(5): Xaa is C or S
PKAXXAPTKLSSLSVLFF

SEQ ID NO: 10795 - protein, 18 aa, Artificial Sequence
  Cyclic GFR-binding peptide
TQLSSLSVLFFDDSSNVI

SEQ ID NO: 10796 - protein, 22 aa, Artificial Sequence
  Cyclic GFR-binding peptide
  MOD_RES (6)..(7): Xaa is C or S
GSAGPXXTPTKMSSLSMLFFND

SEQ ID NO: 10797 - protein, 16 aa, Artificial Sequence
  Cyclic GFR-binding peptide
  MOD_RES (2)..(3): Xaa is C or S
TXXAPVKTSSLSMLFF

SEQ ID NO: 10798 - protein, 27 aa, Artificial Sequence
  Cyclic GFR-binding peptide
  MOD_RES (5)..(5): Xaa is C or S
SSVKXQPSRVHHSSLSVLFFEYVRKKP

SEQ ID NO: 10799 - protein, 18 aa, Artificial Sequence
  Cyclic GFR-binding peptide
TKLSSLSVLFFDSSNNVI

SEQ ID NO: 10800 - protein, 22 aa, Artificial Sequence
  Cyclic GFR-binding peptide
  MOD_RES (5)..(5): Xaa is C or S
SSVKXQPSRVHHSSLSVLFFEY

SEQ ID NO: 10801 - protein, 19 aa, Artificial Sequence
  Cyclic GFR-binding peptide
HHSSLSVLFFEYVRKKPKL

SEQ ID NO: 10802 - protein, 23 aa, Artificial Sequence
  Cyclic GFR-binding peptide
  MOD_RES (6)..(7): Xaa is C or S
YVPKPXXAPTKLSSLSVLFFDDS

SEQ ID NO: 10803 - protein, 24 aa, Artificial Sequence
  Cyclic GFR-binding peptide
  MOD_RES (6)..(7): Xaa is C or S
KVGKAXXVPTKLSSLSVLFFDDMG

SEQ ID NO: 10804 - protein, 20 aa, Artificial Sequence
  Cyclic GFR-binding peptide
  MOD_RES (6)..(7): Xaa is C or S
SIPKAXXVPTELSSLSMLFF

SEQ ID NO: 10805 - protein, 17 aa, Artificial Sequence
  Cyclic GFR-binding peptide
SSLSVLFFEYVRKKPKL

SEQ ID NO: 10806 - protein, 22 aa, Artificial Sequence
  Cyclic GFR-binding peptide
  MOD_RES (6)..(7): Xaa is C or S
ASASPXXVSQDLSSLSILFFIG

SEQ ID NO: 10807 - protein, 17 aa, Artificial Sequence
  Cyclic GFR-binding peptide
KMSSLSMLFFNDKQQII

SEQ ID NO: 10808 - protein, 22 aa, Artificial Sequence
  Cyclic GFR-binding peptide
  MOD_RES (6)..(7): Xaa is C or S
ASASPXXVPQDLSSLSILFFVG

SEQ ID NO: 10809 - protein, 19 aa, Artificial Sequence
  Cyclic GFR-binding peptide
PVKTSSLSMLFFDNGRVLL

SEQ ID NO: 10810 - protein, 18 aa, Artificial Sequence
  Cyclic GFR-binding peptide
QDLSSLSILFFVGRTPKV

SEQ ID NO: 10811 - protein, 25 aa, Artificial Sequence
  Cyclic GFR-binding peptide
  MOD_RES (7)..(7): Xaa is C or S
HVTKPTXAPTKLSSLSVLFFDDSSN

SEQ ID NO: 10812 - protein, 17 aa, Artificial Sequence
  Cyclic GFR-binding peptide
  MOD_RES (4)..(4): Xaa is C or S
GLEXVPTEESSLSMLFF

SEQ ID NO: 10813 - protein, 27 aa, Artificial Sequence
  Cyclic GFR-binding peptide
  MOD_RES (7)..(7): Xaa is C or S
NDEGLEXVPTEESSLSMLFFRIKPHQG

SEQ ID NO: 10814 - protein, 13 aa, Artificial Sequence
  Cyclic GFR-binding peptide
APTKLSSLSVLFF

SEQ ID NO: 10815 - protein, 21 aa, Artificial Sequence
  Cyclic GFR-binding peptide
RVHHSSLSVLFFEYVRKKPKL

SEQ ID NO: 10816 - protein, 18 aa, Artificial Sequence
  Cyclic GFR-binding peptide
TKLSSLSILFFDKGVVTY

SEQ ID NO: 10817 - protein, 22 aa, Artificial Sequence
  Cyclic GFR-binding peptide
  MOD_RES (6)..(7): Xaa is C or S
STPPTXXVPTRLSSLSILFFDS

SEQ ID NO: 10818 - protein, 16 aa, Artificial Sequence
  Cyclic GFR-binding peptide
  MOD_RES (2)..(3): Xaa is C or S
AXXVPTELSSLSMLFF

SEQ ID NO: 10819 - protein, 17 aa, Artificial Sequence
  Cyclic GFR-binding peptide
QLSSLSVLFFDDSSNVI

SEQ ID NO: 10820 - protein, 27 aa, Artificial Sequence
  Cyclic GFR-binding peptide
  MOD_RES (6)..(7): Xaa is C or S
AAPASXXVPARLSSLSILFFDAANNVV

SEQ ID NO: 10821 - protein, 18 aa, Artificial Sequence
  Cyclic GFR-binding peptide
  MOD_RES (4)..(5): Xaa is C or S
PKPXXAPTQLSSLSVLFF

SEQ ID NO: 10822 - protein, 23 aa, Artificial Sequence
  Cyclic GFR-binding peptide
  MOD_RES (6)..(7): Xaa is C or S
AAPASXXVPARLSSLSILFFDAA

SEQ ID NO: 10823 - protein, 27 aa, Artificial Sequence
  Cyclic GFR-binding peptide
  MOD_RES (6)..(7): Xaa is C or S
RVPSTXXAPVKTSSLSMLFFDNGRVLL

SEQ ID NO: 10824 - protein, 21 aa, Artificial Sequence
  Cyclic GFR-binding peptide
  MOD_RES (6)..(7): Xaa is C or S
STPPTXXVPTRLSSLSILFFD

SEQ ID NO: 10825 - protein, 27 aa, Artificial Sequence
  Cyclic GFR-binding peptide
  MOD_RES (6)..(7): Xaa is C or S
TVPKPXXAPTQLSSLSVLFFDDSSNVI

SEQ ID NO: 10826 - protein, 26 aa, Artificial Sequence
  Cyclic GFR-binding peptide
  MOD_RES (6)..(7): Xaa is C or S
KASKAXXVPTKLSSLSILFFDKGVVT

SEQ ID NO: 10827 - protein, 15 aa, Artificial Sequence
  Cyclic GFR-binding peptide
  MOD_RES (1)..(2): Xaa is C or S
XXVPTRLSSLSILFF

SEQ ID NO: 10828 - protein, 19 aa, Artificial Sequence
  Cyclic GFR-binding peptide
PQALSSLSILFFVGRKPKV

SEQ ID NO: 10829 - protein, 20 aa, Artificial Sequence
  Cyclic GFR-binding peptide
VHHSSLSVLFFEYVRKKPKL

SEQ ID NO: 10830 - protein, 16 aa, Artificial Sequence
  Cyclic GFR-binding peptide
  MOD_RES (2)..(3): Xaa is C or S
SXXVPARLSSLSILFF

SEQ ID NO: 10831 - protein, 14 aa, Artificial Sequence
  Cyclic GFR-binding peptide
  MOD_RES (1)..(1): Xaa is C or S
XVPQDLSSLSILFF

SEQ ID NO: 10832 - protein, 17 aa, Artificial Sequence
  Cyclic GFR-binding peptide
KLSSLSVLFFDDSSNVI

SEQ ID NO: 10833 - protein, 19 aa, Artificial Sequence
  Cyclic GFR-binding peptide
  MOD_RES (5)..(6): Xaa is C or S
VPKPXXAPTQLSSLSVLFF

SEQ ID NO: 10834 - protein, 14 aa, Artificial Sequence
  Cyclic GFR-binding peptide
  MOD_RES (1)..(1): Xaa is C or S
XVPTELSSLSMLFF

SEQ ID NO: 10835 - protein, 14 aa, Artificial Sequence
  Cyclic GFR-binding peptide
  MOD_RES (1)..(1): Xaa is C or S
XAPTQLSSLSVLFF

SEQ ID NO: 10836 - protein, 14 aa, Artificial Sequence
  Cyclic GFR-binding peptide
  MOD_RES (1)..(1): Xaa is C or S
XVPQALSSLSILFF

SEQ ID NO: 10837 - protein, 16 aa, Artificial Sequence
  Cyclic GFR-binding peptide
  MOD_RES (3)..(3): Xaa is C or S
LEXVPTEESSLSMLFF

SEQ ID NO: 10838 - protein, 15 aa, Artificial Sequence
  Cyclic GFR-binding peptide
  MOD_RES (1)..(2): Xaa is C or S
XXAPVKTSSLSMLFF

SEQ ID NO: 10839 - protein, 14 aa, Artificial Sequence
  Cyclic GFR-binding peptide
PSRVHHSSLSVLFF

SEQ ID NO: 10840 - protein, 19 aa, Artificial Sequence
  Cyclic GFR-binding peptide
  MOD_RES (5)..(6): Xaa is C or S
SASPXXVPQDLSSLSILFF

SEQ ID NO: 10841 - protein, 16 aa, Artificial Sequence
  Cyclic GFR-binding peptide
  MOD_RES (2)..(3): Xaa is C or S
PXXVSQDLSSLSILFF

SEQ ID NO: 10842 - protein, 24 aa, Artificial Sequence
  Cyclic GFR-binding peptide
  MOD_RES (6)..(7): Xaa is C or S
YVPKPXXAPTKLSSLSVLFFDDSS

SEQ ID NO: 10843 - protein, 24 aa, Artificial Sequence
  Cyclic GFR-binding peptide
  MOD_RES (6)..(7): Xaa is C or S
RVPSTXXAPVKTSSLSMLFFDNGR

SEQ ID NO: 10844 - protein, 15 aa, Artificial Sequence
  Cyclic GFR-binding peptide
QPSRVHHSSLSVLFF

SEQ ID NO: 10845 - protein, 15 aa, Artificial Sequence
  Cyclic GFR-binding peptide
SSLSILFFVGRTPKV

SEQ ID NO: 10846 - protein, 25 aa, Artificial Sequence
  Cyclic GFR-binding peptide
  MOD_RES (6)..(7): Xaa is C or S
ASASPXXVSQDLSSLSILFFIGKTP

SEQ ID NO: 10847 - protein, 14 aa, Artificial Sequence
  Cyclic GFR-binding peptide
  MOD_RES (1)..(1): Xaa is C or S
XVPTKLSSLSILFF

SEQ ID NO: 10848 - protein, 17 aa, Artificial Sequence
  Cyclic GFR-binding peptide
ELSSLSMLFFDEYDKVV

SEQ ID NO: 10849 - protein, 21 aa, Artificial Sequence
  Cyclic GFR-binding peptide
  MOD_RES (6)..(7): Xaa is C or S
YVPKPXXAPTKLSSLSVLFFD

SEQ ID NO: 10850 - protein, 13 aa, Artificial Sequence
  Cyclic GFR-binding peptide
VPTKLSSLSVLFF

SEQ ID NO: 10851 - protein, 24 aa, Artificial Sequence
  Cyclic GFR-binding peptide
  MOD_RES (6)..(7): Xaa is C or S
KASKAXXVPTKLSSLSILFFDKGV

SEQ ID NO: 10852 - protein, 24 aa, Artificial Sequence
  Cyclic GFR-binding peptide
  MOD_RES (6)..(7): Xaa is C or S
AVPKAXXAPTKLSSLSVLFFDSSN

SEQ ID NO: 10853 - protein, 25 aa, Artificial Sequence
  Cyclic GFR-binding peptide
  MOD_RES (6)..(7): Xaa is C or S
KASKAXXVPTKLSSLSILFFDKGVV

SEQ ID NO: 10854 - protein, 20 aa, Artificial Sequence
  Cyclic GFR-binding peptide
TEESSLSMLFFRIKPHQGQH

SEQ ID NO: 10855 - protein, 19 aa, Artificial Sequence
  Cyclic GFR-binding peptide
PTRLSSLSILFFDSANNVV

SEQ ID NO: 10856 - protein, 18 aa, Artificial Sequence
  Cyclic GFR-binding peptide
  MOD_RES (4)..(5): Xaa is C or S
AAPXXVPQALSSLSILFF

SEQ ID NO: 10857 - protein, 28 aa, Artificial Sequence
  Cyclic GFR-binding peptide
  MOD_RES (7)..(7): Xaa is C or S
NDEGLEXVPTEESSLSMLFFRIKPHQGQ

SEQ ID NO: 10858 - protein, 19 aa, Artificial Sequence
  Cyclic GFR-binding peptide
PTELSSLSMLFFDENEKVV

SEQ ID NO: 10859 - protein, 19 aa, Artificial Sequence
  Cyclic GFR-binding peptide
PARLSSLSILFFDAANNVV

SEQ ID NO: 10860 - protein, 22 aa, Artificial Sequence
  Cyclic GFR-binding peptide
  MOD_RES (6)..(7): Xaa is C or S
AAPASXXVPARLSSLSILFFDA

SEQ ID NO: 10861 - protein, 25 aa, Artificial Sequence
  Cyclic GFR-binding peptide
  MOD_RES (6)..(7): Xaa is C or S
AAPASXXVPARLSSLSILFFDAANN

SEQ ID NO: 10862 - protein, 18 aa, Artificial Sequence
  Cyclic GFR-binding peptide
  MOD_RES (4)..(5): Xaa is C or S
PSTXXAPVKTSSLSMLFF

SEQ ID NO: 10863 - protein, 24 aa, Artificial Sequence
  Cyclic GFR-binding peptide
  MOD_RES (7)..(7): Xaa is C or S
HVTKPTXAPTKLSSLSVLFFDDSS

SEQ ID NO: 10864 - protein, 26 aa, Artificial Sequence
  Cyclic GFR-binding peptide
  MOD_RES (7)..(7): Xaa is C or S
HVTKPTXAPTKLSSLSVLFFDDSSNV

SEQ ID NO: 10865 - protein, 24 aa, Artificial Sequence
  Cyclic GFR-binding peptide
  MOD_RES (6)..(7): Xaa is C or S
ASASPXXVPQDLSSLSILFFVGRT

SEQ ID NO: 10866 - protein, 16 aa, Artificial Sequence
  Cyclic GFR-binding peptide
  MOD_RES (2)..(3): Xaa is C or S
AXXVPTKLSSLSVLFF

SEQ ID NO: 10867 - protein, 16 aa, Artificial Sequence
  Cyclic GFR-binding peptide
LSSLSILFFVGRKPKV

SEQ ID NO: 10868 - protein, 22 aa, Artificial Sequence
  Cyclic GFR-binding peptide
  MOD_RES (6)..(7): Xaa is C or S
KVGKAXXVPTKLSSLSVLFFDD

SEQ ID NO: 10869 - protein, 16 aa, Artificial Sequence
  Cyclic GFR-binding peptide
  MOD_RES (2)..(3): Xaa is C or S
PXXAPTKLSSLSVLFF

SEQ ID NO: 10870 - protein, 16 aa, Artificial Sequence
  Cyclic GFR-binding peptide
  MOD_RES (2)..(3): Xaa is C or S
PXXAPTQLSSLSVLFF

SEQ ID NO: 10871 - protein, 20 aa, Artificial Sequence
  Cyclic GFR-binding peptide
  MOD_RES (6)..(7): Xaa is C or S
KVGKAXXVPTKLSSLSVLFF

SEQ ID NO: 10872 - protein, 18 aa, Artificial Sequence
  Cyclic GFR-binding peptide
  MOD_RES (4)..(5): Xaa is C or S
ASPXXVSQDLSSLSILFF

SEQ ID NO: 10873 - protein, 16 aa, Artificial Sequence
  Cyclic GFR-binding peptide
  MOD_RES (1)..(1): Xaa is C or S
XQPSRVHHSSLSVLFF

SEQ ID NO: 10874 - protein, 23 aa, Artificial Sequence
  Cyclic GFR-binding peptide
  MOD_RES (6)..(7): Xaa is C or S
AVPKAXXAPTKLSSLSVLFFDSS

SEQ ID NO: 10875 - protein, 14 aa, Artificial Sequence
  Cyclic GFR-binding peptide
  MOD_RES (1)..(1): Xaa is C or S
XVPTKLSSLSVLFF

SEQ ID NO: 10876 - protein, 15 aa, Artificial Sequence
  Cyclic GFR-binding peptide
SSLSVLFFDDMGVPT

SEQ ID NO: 10877 - protein, 19 aa, Artificial Sequence
  Cyclic GFR-binding peptide
PTKMSSLSMLFFNDKQQII

SEQ ID NO: 10878 - protein, 25 aa, Artificial Sequence
  Cyclic GFR-binding peptide
  MOD_RES (6)..(7): Xaa is C or S
YVPKPXXAPTKLSSLSVLFFDDSSN

SEQ ID NO: 10879 - protein, 23 aa, Artificial Sequence
  Cyclic GFR-binding peptide
  MOD_RES (6)..(7): Xaa is C or S
RVPSTXXAPVKTSSLSMLFFDNG

SEQ ID NO: 10880 - protein, 17 aa, Artificial Sequence
  Cyclic GFR-binding peptide
  MOD_RES (3)..(4): Xaa is C or S
SPXXVSQDLSSLSILFF

SEQ ID NO: 10881 - protein, 15 aa, Artificial Sequence
  Cyclic GFR-binding peptide
  MOD_RES (1)..(2): Xaa is C or S
XXVPQALSSLSILFF

SEQ ID NO: 10882 - protein, 16 aa, Artificial Sequence
  Cyclic GFR-binding peptide
LSSLSILFFIGKTPKI

SEQ ID NO: 10883 - protein, 27 aa, Artificial Sequence
  Cyclic GFR-binding peptide
  MOD_RES (6)..(7): Xaa is C or S
KVGKAXXVPTKLSSLSVLFFDDMGVPT

SEQ ID NO: 10884 - protein, 27 aa, Artificial Sequence
  Cyclic GFR-binding peptide
  MOD_RES (6)..(7): Xaa is C or S
ASASPXXVPQDLSSLSILFFVGRTPKV

SEQ ID NO: 10885 - protein, 15 aa, Artificial Sequence
  Cyclic GFR-binding peptide
SSLSILFFIGKTPKI

SEQ ID NO: 10886 - protein, 18 aa, Artificial Sequence
  Cyclic GFR-binding peptide
  MOD_RES (3)..(3): Xaa is C or S
VKXQPSRVHHSSLSVLFF

SEQ ID NO: 10887 - protein, 22 aa, Artificial Sequence
  Cyclic GFR-binding peptide
  MOD_RES (6)..(7): Xaa is C or S
KIPKAXXVPTELSSLSMLFFDE

SEQ ID NO: 10888 - protein, 16 aa, Artificial Sequence
  Cyclic GFR-binding peptide
MSSLSMLFFNDKQQII

SEQ ID NO: 10889 - protein, 23 aa, Artificial Sequence
  Cyclic GFR-binding peptide
  MOD_RES (7)..(7): Xaa is C or S
NDEGLEXVPTEESSLSMLFFRIK

SEQ ID NO: 10890 - protein, 19 aa, Artificial Sequence
  Cyclic GFR-binding peptide
  MOD_RES (5)..(6): Xaa is C or S
SAAPXXVPQALSSLSILFF

SEQ ID NO: 10891 - protein, 27 aa, Artificial Sequence
  Cyclic GFR-binding peptide
  MOD_RES (6)..(7): Xaa is C or S
HVPKPXXAPTKLSSLSVLFFDDSSNVI

SEQ ID NO: 10892 - protein, 23 aa, Artificial Sequence
  Cyclic GFR-binding peptide
  MOD_RES (6)..(7): Xaa is C or S
ASASPXXVSQDLSSLSILFFIGK

SEQ ID NO: 10893 - protein, 22 aa, Artificial Sequence
  Cyclic GFR-binding peptide
  MOD_RES (6)..(7): Xaa is C or S
YVPKPXXAPTKLSSLSVLFFDD

SEQ ID NO: 10894 - protein, 17 aa, Artificial Sequence
  Cyclic GFR-binding peptide
  MOD_RES (3)..(4): Xaa is C or S
PTXXVPTRLSSLSILFF

SEQ ID NO: 10895 - protein, 26 aa, Artificial Sequence
  Cyclic GFR-binding peptide
  MOD_RES (6)..(7): Xaa is C or S
RVPSTXXAPVKTSSLSMLFFDNGRVL

SEQ ID NO: 10896 - protein, 17 aa, Artificial Sequence
  Cyclic GFR-binding peptide
  MOD_RES (3)..(4): Xaa is C or S
STXXAPVKTSSLSMLFF

SEQ ID NO: 10897 - protein, 29 aa, Artificial Sequence
  Cyclic GFR-binding peptide
  MOD_RES (7)..(7): Xaa is C or S
NDEGLEXVPTEESSLSMLFFRIKPHQGQH

SEQ ID NO: 10898 - protein, 27 aa, Artificial Sequence
  Cyclic GFR-binding peptide
  MOD_RES (6)..(7): Xaa is C or S
AVPKAXXAPTKLSSLSVLFFDSSNNVI

SEQ ID NO: 10899 - protein, 26 aa, Artificial Sequence
  Cyclic GFR-binding peptide
  MOD_RES (5)..(5): Xaa is C or S
SSVKXQPSRVHHSSLSVLFFEYVRKK

SEQ ID NO: 10900 - protein, 26 aa, Artificial Sequence
  Cyclic GFR-binding peptide
  MOD_RES (6)..(7): Xaa is C or S
STPPTXXVPTRLSSLSILFFDSANNV

SEQ ID NO: 10901 - protein, 21 aa, Artificial Sequence
  Cyclic GFR-binding peptide
  MOD_RES (6)..(7): Xaa is C or S
HVPKPXXAPTKLSSLSVLFFD

SEQ ID NO: 10902 - protein, 15 aa, Artificial Sequence
  Cyclic GFR-binding peptide
SSLSILFFDAANNVV

SEQ ID NO: 10903 - protein, 15 aa, Artificial Sequence
  Cyclic GFR-binding peptide
  MOD_RES (1)..(2): Xaa is C or S
XXAPTKLSSLSVLFF

SEQ ID NO: 10904 - protein, 17 aa, Artificial Sequence
  Cyclic GFR-binding peptide
DLSSLSILFFVGRTPKV

SEQ ID NO: 10905 - protein, 14 aa, Artificial Sequence
  Cyclic GFR-binding peptide
  MOD_RES (1)..(1): Xaa is C or S
XVSQDLSSLSILFF

SEQ ID NO: 10906 - protein, 19 aa, Artificial Sequence
  Cyclic GFR-binding peptide
  MOD_RES (5)..(6): Xaa is C or S
APASXXVPARLSSLSILFF

SEQ ID NO: 10907 - protein, 18 aa, Artificial Sequence
  Cyclic GFR-binding peptide
TKMSSLSMLFFNDKQQII

SEQ ID NO: 10908 - protein, 13 aa, Artificial Sequence
  Cyclic GFR-binding peptide
VPTELSSLSMLFF

SEQ ID NO: 10909 - protein, 22 aa, Artificial Sequence
  Cyclic GFR-binding peptide
  MOD_RES (7)..(7): Xaa is C or S
NDEGLEXVPTEESSLSMLFFRI

SEQ ID NO: 10910 - protein, 27 aa, Artificial Sequence
  Cyclic GFR-binding peptide
  MOD_RES (6)..(7): Xaa is C or S
KIPKAXXVPTELSSLSMLFFDENEKVV

SEQ ID NO: 10911 - protein, 25 aa, Artificial Sequence
  Cyclic GFR-binding peptide
  MOD_RES (6)..(7): Xaa is C or S
TVPKPXXAPTQLSSLSVLFFDDSSN

SEQ ID NO: 10912 - protein, 15 aa, Artificial Sequence
  Cyclic GFR-binding peptide
SSLSMLFFDNGRVLL

SEQ ID NO: 10913 - protein, 24 aa, Artificial Sequence
  Cyclic GFR-binding peptide
  MOD_RES (6)..(7): Xaa is C or S
SIPKAXXVPTELSSLSMLFFDEYD

SEQ ID NO: 10914 - protein, 18 aa, Artificial Sequence
  Cyclic GFR-binding peptide
  MOD_RES (4)..(5): Xaa is C or S
PKPXXAPTKLSSLSVLFF

SEQ ID NO: 10915 - protein, 21 aa, Artificial Sequence
  Cyclic GFR-binding peptide
  MOD_RES (6)..(7): Xaa is C or S
AAPASXXVPARLSSLSILFFD

SEQ ID NO: 10916 - protein, 21 aa, Artificial Sequence
  Cyclic GFR-binding peptide
  MOD_RES (6)..(7): Xaa is C or S
ASASPXXVSQDLSSLSILFFI

SEQ ID NO: 10917 - protein, 23 aa, Artificial Sequence
  Cyclic GFR-binding peptide
  MOD_RES (6)..(7): Xaa is C or S
TVPKPXXAPTQLSSLSVLFFDDS

SEQ ID NO: 10918 - protein, 22 aa, Artificial Sequence
  Cyclic GFR-binding peptide
  MOD_RES (7)..(7): Xaa is C or S
HVTKPTXAPTKLSSLSVLFFDD

SEQ ID NO: 10919 - protein, 14 aa, Artificial Sequence
  Cyclic GFR-binding peptide
  MOD_RES (1)..(1): Xaa is C or S
XVPARLSSLSILFF

SEQ ID NO: 10920 - protein, 21 aa, Artificial Sequence
  Cyclic GFR-binding peptide
  MOD_RES (6)..(7): Xaa is C or S
KASKAXXVPTKLSSLSILFFD

SEQ ID NO: 10921 - protein, 23 aa, Artificial Sequence
  Cyclic GFR-binding peptide
  MOD_RES (6)..(7): Xaa is C or S
STPPTXXVPTRLSSLSILFFDSA

SEQ ID NO: 10922 - protein, 26 aa, Artificial Sequence
  Cyclic GFR-binding peptide
  MOD_RES (6)..(7): Xaa is C or S
AAPASXXVPARLSSLSILFFDAANNV

SEQ ID NO: 10923 - protein, 19 aa, Artificial Sequence
  Cyclic GFR-binding peptide
  MOD_RES (4)..(4): Xaa is C or S
SVKXQPSRVHHSSLSVLFF

SEQ ID NO: 10924 - protein, 19 aa, Artificial Sequence
  Cyclic GFR-binding peptide
  MOD_RES (5)..(6): Xaa is C or S
SAGPXXTPTKMSSLSMLFF

SEQ ID NO: 10925 - protein, 17 aa, Artificial Sequence
  Cyclic GFR-binding peptide
RLSSLSILFFDSANNVV

SEQ ID NO: 10926 - protein, 20 aa, Artificial Sequence
  Cyclic GFR-binding peptide
  MOD_RES (6)..(7): Xaa is C or S
ASASPXXVPQDLSSLSILFF

SEQ ID NO: 10927 - protein, 17 aa, Artificial Sequence
  Cyclic GFR-binding peptide
  MOD_RES (3)..(4): Xaa is C or S
KPXXAPTKLSSLSVLFF

SEQ ID NO: 10928 - protein, 17 aa, Artificial Sequence
  Cyclic GFR-binding peptide
  MOD_RES (3)..(4): Xaa is C or S
KAXXVPTKLSSLSILFF

SEQ ID NO: 10929 - protein, 13 aa, Artificial Sequence
  Cyclic GFR-binding peptide
VPQDLSSLSILFF

SEQ ID NO: 10930 - protein, 20 aa, Artificial Sequence
  Cyclic GFR-binding peptide
  MOD_RES (6)..(7): Xaa is C or S
AAPASXXVPARLSSLSILFF

SEQ ID NO: 10931 - protein, 15 aa, Artificial Sequence
  Cyclic GFR-binding peptide
SSLSMLFFDEYDKVV

SEQ ID NO: 10932 - protein, 21 aa, Artificial Sequence
  Cyclic GFR-binding peptide
  MOD_RES (6)..(7): Xaa is C or S
ASAAPXXVPQALSSLSILFFV

SEQ ID NO: 10933 - protein, 20 aa, Artificial Sequence
  Cyclic GFR-binding peptide
  MOD_RES (7)..(7): Xaa is C or S
HVTKPTXAPTKLSSLSVLFF

SEQ ID NO: 10934 - protein, 24 aa, Artificial Sequence
  Cyclic GFR-binding peptide
  MOD_RES (6)..(7): Xaa is C or S
STPPTXXVPTRLSSLSILFFDSAN

SEQ ID NO: 10935 - protein, 24 aa, Artificial Sequence
  Cyclic GFR-binding peptide
  MOD_RES (6)..(7): Xaa is C or S
ASAAPXXVPQALSSLSILFFVGRK

SEQ ID NO: 10936 - protein, 17 aa, Artificial Sequence
  Cyclic GFR-binding peptide
RLSSLSILFFDAANNVV

SEQ ID NO: 10937 - protein, 15 aa, Artificial Sequence
  Cyclic GFR-binding peptide
SSLSILFFVGRKPKV

SEQ ID NO: 10938 - protein, 15 aa, Artificial Sequence
  Cyclic GFR-binding peptide
SSLSVLFFDDSSNVI

SEQ ID NO: 10939 - protein, 29 aa, Artificial Sequence
  Cyclic GFR-binding peptide
  MOD_RES (5)..(5): Xaa is C or S
SSVKXQPSRVHHSSLSVLFFEYVRKKPKL

SEQ ID NO: 10940 - protein, 18 aa, Artificial Sequence
  Cyclic GFR-binding peptide
VKTSSLSMLFFDNGRVLL

SEQ ID NO: 10941 - protein, 20 aa, Artificial Sequence
  Cyclic GFR-binding peptide
  MOD_RES (5)..(5): Xaa is C or S
SSVKXQPSRVHHSSLSVLFF

SEQ ID NO: 10942 - protein, 15 aa, Artificial Sequence
  Cyclic GFR-binding peptide
  MOD_RES (1)..(2): Xaa is C or S
XXVPQDLSSLSILFF

SEQ ID NO: 10943 - protein, 23 aa, Artificial Sequence
  Cyclic GFR-binding peptide
  MOD_RES (6)..(7): Xaa is C or S
ASASPXXVPQDLSSLSILFFVGR

SEQ ID NO: 10944 - protein, 27 aa, Artificial Sequence
  Cyclic GFR-binding peptide
  MOD_RES (6)..(7): Xaa is C or S
ASASPXXVSQDLSSLSILFFIGKTPKI

SEQ ID NO: 10945 - protein, 25 aa, Artificial Sequence
  Cyclic GFR-binding peptide
  MOD_RES (6)..(7): Xaa is C or S
SIPKAXXVPTELSSLSMLFFDEYDK

SEQ ID NO: 10946 - protein, 16 aa, Artificial Sequence
  Cyclic GFR-binding peptide
LSSLSVLFFDSSNNVI

SEQ ID NO: 10947 - protein, 26 aa, Artificial Sequence
  Cyclic GFR-binding peptide
  MOD_RES (6)..(7): Xaa is C or S
TVPKPXXAPTQLSSLSVLFFDDSSNV

SEQ ID NO: 10948 - protein, 26 aa, Artificial Sequence
  Cyclic GFR-binding peptide
  MOD_RES (6)..(7): Xaa is C or S
ASASPXXVPQDLSSLSILFFVGRTPK

SEQ ID NO: 10949 - protein, 17 aa, Artificial Sequence
  Cyclic GFR-binding peptide
ALSSLSILFFVGRKPKV

SEQ ID NO: 10950 - protein, 19 aa, Artificial Sequence
  Cyclic GFR-binding peptide
PTKLSSLSVLFFDDSSNVI

SEQ ID NO: 10951 - protein, 18 aa, Artificial Sequence
  Cyclic GFR-binding peptide
TRLSSLSILFFDSANNVV

SEQ ID NO: 10952 - protein, 16 aa, Artificial Sequence
  Cyclic GFR-binding peptide
LSSLSILFFDKGVVTY

SEQ ID NO: 10953 - protein, 21 aa, Artificial Sequence
  Cyclic GFR-binding peptide
  MOD_RES (6)..(7): Xaa is C or S
AVPKAXXAPTKLSSLSVLFFD

SEQ ID NO: 10954 - protein, 20 aa, Artificial Sequence
  Cyclic GFR-binding peptide
  MOD_RES (6)..(7): Xaa is C or S
STPPTXXVPTRLSSLSILFF

SEQ ID NO: 10955 - protein, 18 aa, Artificial Sequence
  Cyclic GFR-binding peptide
ARLSSLSILFFDAANNVV

SEQ ID NO: 10956 - protein, 25 aa, Artificial Sequence
  Cyclic GFR-binding peptide
  MOD_RES (6)..(7): Xaa is C or S
GSAGPXXTPTKMSSLSMLFFNDKQQ

SEQ ID NO: 10957 - protein, 19 aa, Artificial Sequence
  Cyclic GFR-binding peptide
  MOD_RES (5)..(6): Xaa is C or S
VGKAXXVPTKLSSLSVLFF

SEQ ID NO: 10958 - protein, 23 aa, Artificial Sequence
  Cyclic GFR-binding peptide
  MOD_RES (6)..(7): Xaa is C or S
KIPKAXXVPTELSSLSMLFFDEN

SEQ ID NO: 10959 - protein, 18 aa, Artificial Sequence
  Cyclic GFR-binding peptide
  MOD_RES (5)..(5): Xaa is C or S
TKPTXAPTKLSSLSVLFF

SEQ ID NO: 10960 - protein, 25 aa, Artificial Sequence
  Cyclic GFR-binding peptide
  MOD_RES (6)..(7): Xaa is C or S
ASAAPXXVPQALSSLSILFFVGRKP

SEQ ID NO: 10961 - protein, 20 aa, Artificial Sequence
  Cyclic GFR-binding peptide
  MOD_RES (7)..(7): Xaa is C or S
NDEGLEXVPTEESSLSMLFF

SEQ ID NO: 10962 - protein, 19 aa, Artificial Sequence
  Cyclic GFR-binding peptide
PQDLSSLSILFFVGRTPKV

SEQ ID NO: 10963 - protein, 19 aa, Artificial Sequence
  Cyclic GFR-binding peptide
PTELSSLSMLFFDEYDKVV

SEQ ID NO: 10964 - protein, 17 aa, Artificial Sequence
  Cyclic GFR-binding peptide
  MOD_RES (2)..(2): Xaa is C or S
KXQPSRVHHSSLSVLFF

SEQ ID NO: 10965 - protein, 26 aa, Artificial Sequence
  Cyclic GFR-binding peptide
  MOD_RES (6)..(7): Xaa is C or S
GSAGPXXTPTKMSSLSMLFFNDKQQI

SEQ ID NO: 10966 - protein, 13 aa, Artificial Sequence
  Cyclic GFR-binding peptide
VPQALSSLSILFF

SEQ ID NO: 10967 - protein, 22 aa, Artificial Sequence
  Cyclic GFR-binding peptide
  MOD_RES (6)..(7): Xaa is C or S
TVPKPXXAPTQLSSLSVLFFDD

SEQ ID NO: 10968 - protein, 19 aa, Artificial Sequence
  Cyclic GFR-binding peptide
PTKLSSLSILFFDKGVVTY

SEQ ID NO: 10969 - protein, 25 aa, Artificial Sequence
  Cyclic GFR-binding peptide
  MOD_RES (6)..(7): Xaa is C or S
RVPSTXXAPVKTSSLSMLFFDNGRV

SEQ ID NO: 10970 - protein, 19 aa, Artificial Sequence
  Cyclic GFR-binding peptide
PTQLSSLSVLFFDDSSNVI

SEQ ID NO: 10971 - protein, 16 aa, Artificial Sequence
  Cyclic GFR-binding peptide
  MOD_RES (2)..(3): Xaa is C or S
PXXVPQDLSSLSILFF

SEQ ID NO: 10972 - protein, 16 aa, Artificial Sequence
  Cyclic GFR-binding peptide
TSSLSMLFFDNGRVLL

SEQ ID NO: 10973 - protein, 15 aa, Artificial Sequence
  Cyclic GFR-binding peptide
SSLSMLFFDENEKVV

SEQ ID NO: 10974 - protein, 17 aa, Artificial Sequence
  Cyclic GFR-binding peptide
SSLSMLFFRIKPHQGQH

SEQ ID NO: 10975 - protein, 15 aa, Artificial Sequence
  Cyclic GFR-binding peptide
  MOD_RES (1)..(2): Xaa is C or S
XXVPARLSSLSILFF

SEQ ID NO: 10976 - protein, 22 aa, Artificial Sequence
  Cyclic GFR-binding peptide
  MOD_RES (6)..(7): Xaa is C or S
ASAAPXXVPQALSSLSILFFVG

SEQ ID NO: 10977 - protein, 18 aa, Artificial Sequence
  Cyclic GFR-binding peptide
  MOD_RES (4)..(5): Xaa is C or S
AGPXXTPTKMSSLSMLFF

SEQ ID NO: 10978 - protein, 19 aa, Artificial Sequence
  Cyclic GFR-binding peptide
PTKLSSLSVLFFDSSNNVI

SEQ ID NO: 10979 - protein, 13 aa, Artificial Sequence
  Cyclic GFR-binding peptide
VPTKLSSLSILFF

SEQ ID NO: 10980 - protein, 26 aa, Artificial Sequence
  Cyclic GFR-binding peptide
  MOD_RES (7)..(7): Xaa is C or S
NDEGLEXVPTEESSLSMLFFRIKPHQ

SEQ ID NO: 10981 - protein, 21 aa, Artificial Sequence
  Cyclic GFR-binding peptide
  MOD_RES (6)..(7): Xaa is C or S
KIPKAXXVPTELSSLSMLFFD

SEQ ID NO: 10982 - protein, 15 aa, Artificial Sequence
  Cyclic GFR-binding peptide
  MOD_RES (1)..(2): Xaa is C or S
XXVPTELSSLSMLFF

SEQ ID NO: 10983 - protein, 25 aa, Artificial Sequence
  Cyclic GFR-binding peptide
  MOD_RES (6)..(7): Xaa is C or S
HVPKPXXAPTKLSSLSVLFFDDSSN

SEQ ID NO: 10984 - protein, 18 aa, Artificial Sequence
  Cyclic GFR-binding peptide
QDLSSLSILFFIGKTPKI

SEQ ID NO: 10985 - protein, 16 aa, Artificial Sequence
  Cyclic GFR-binding peptide
  MOD_RES (2)..(3): Xaa is C or S
PXXTPTKMSSLSMLFF

SEQ ID NO: 10986 - protein, 16 aa, Artificial Sequence
  Cyclic GFR-binding peptide
LSSLSMLFFDEYDKVV

SEQ ID NO: 10987 - protein, 13 aa, Artificial Sequence
  Cyclic GFR-binding peptide
APTQLSSLSVLFF

SEQ ID NO: 10988 - protein, 18 aa, Artificial Sequence
  Cyclic GFR-binding peptide
  MOD_RES (4)..(5): Xaa is C or S
PPTXXVPTRLSSLSILFF

SEQ ID NO: 10989 - protein, 26 aa, Artificial Sequence
  Cyclic GFR-binding peptide
  MOD_RES (6)..(7): Xaa is C or S
KVGKAXXVPTKLSSLSVLFFDDMGVP

SEQ ID NO: 10990 - protein, 16 aa, Artificial Sequence
  Cyclic GFR-binding peptide
  MOD_RES (3)..(3): Xaa is C or S
PTXAPTKLSSLSVLFF

SEQ ID NO: 10991 - protein, 19 aa, Artificial Sequence
  Cyclic GFR-binding peptide
PTKLSSLSVLFFDDMGVPT

SEQ ID NO: 10992 - protein, 15 aa, Artificial Sequence
  Cyclic GFR-binding peptide
  MOD_RES (1)..(2): Xaa is C or S
XXVPTKLSSLSVLFF

SEQ ID NO: 10993 - protein, 20 aa, Artificial Sequence
  Cyclic GFR-binding peptide
  MOD_RES (6)..(7): Xaa is C or S
GSAGPXXTPTKMSSLSMLFF

SEQ ID NO: 10994 - protein, 26 aa, Artificial Sequence
  Cyclic GFR-binding peptide
  MOD_RES (6)..(7): Xaa is C or S
ASASPXXVSQDLSSLSILFFIGKTPK

SEQ ID NO: 10995 - protein, 22 aa, Artificial Sequence
  Cyclic GFR-binding peptide
  MOD_RES (6)..(7): Xaa is C or S
KASKAXXVPTKLSSLSILFFDK

SEQ ID NO: 10996 - protein, 13 aa, Artificial Sequence
  Cyclic GFR-binding peptide
SRVHHSSLSVLFF

SEQ ID NO: 10997 - protein, 18 aa, Artificial Sequence
  Cyclic GFR-binding peptide
  MOD_RES (4)..(5): Xaa is C or S
SKAXXVPTKLSSLSILFF

SEQ ID NO: 10998 - protein, 25 aa, Artificial Sequence
  Cyclic GFR-binding peptide
  MOD_RES (5)..(5): Xaa is C or S
SSVKXQPSRVHHSSLSVLFFEYVRK

SEQ ID NO: 10999 - protein, 16 aa, Artificial Sequence
  Cyclic GFR-binding peptide
  MOD_RES (2)..(3): Xaa is C or S
AXXVPTKLSSLSILFF

SEQ ID NO: 11000 - protein, 17 aa, Artificial Sequence
  Cyclic GFR-binding peptide
  MOD_RES (3)..(4): Xaa is C or S
KPXXAPTQLSSLSVLFF

SEQ ID NO: 11001 - protein, 17 aa, Artificial Sequence
  Cyclic GFR-binding peptide
  MOD_RES (3)..(4): Xaa is C or S
KAXXAPTKLSSLSVLFF

SEQ ID NO: 11002 - protein, 26 aa, Artificial Sequence
  Cyclic GFR-binding peptide
  MOD_RES (6)..(7): Xaa is C or S
AVPKAXXAPTKLSSLSVLFFDSSNNV

SEQ ID NO: 11003 - protein, 23 aa, Artificial Sequence
  Cyclic GFR-binding peptide
  MOD_RES (7)..(7): Xaa is C or S
HVTKPTXAPTKLSSLSVLFFDDS

SEQ ID NO: 11004 - protein, 13 aa, Artificial Sequence
  Cyclic GFR-binding peptide
VPTRLSSLSILFF

SEQ ID NO: 11005 - protein, 15 aa, Artificial Sequence
  Cyclic GFR-binding peptide
  MOD_RES (1)..(2): Xaa is C or S
XXTPTKMSSLSMLFF

SEQ ID NO: 11006 - protein, 27 aa, Artificial Sequence
  Cyclic GFR-binding peptide
  MOD_RES (6)..(7): Xaa is C or S
SIPKAXXVPTELSSLSMLFFDEYDKVV

SEQ ID NO: 11007 - protein, 20 aa, Artificial Sequence
  Cyclic GFR-binding peptide
  MOD_RES (6)..(7): Xaa is C or S
KIPKAXXVPTELSSLSMLFF

SEQ ID NO: 11008 - protein, 13 aa, Artificial Sequence
  Cyclic GFR-binding peptide
TPTKMSSLSMLFF

SEQ ID NO: 11009 - protein, 16 aa, Artificial Sequence
  Cyclic GFR-binding peptide
LSSLSVLFFDDSSNVI

SEQ ID NO: 11010 - protein, 14 aa, Artificial Sequence
  Cyclic GFR-binding peptide
  MOD_RES (1)..(1): Xaa is C or S
XVPTEESSLSMLFF

SEQ ID NO: 11011 - protein, 17 aa, Artificial Sequence
  Cyclic GFR-binding peptide
  MOD_RES (3)..(4): Xaa is C or S
GPXXTPTKMSSLSMLFF

SEQ ID NO: 11012 - protein, 20 aa, Artificial Sequence
  Cyclic GFR-binding peptide
  MOD_RES (6)..(7): Xaa is C or S
TVPKPXXAPTQLSSLSVLFF

SEQ ID NO: 11013 - protein, 18 aa, Artificial Sequence
  Cyclic GFR-binding peptide
TELSSLSMLFFDENEKVV

SEQ ID NO: 11014 - protein, 23 aa, Artificial Sequence
  Cyclic GFR-binding peptide
  MOD_RES (5)..(5): Xaa is C or S
SSVKXQPSRVHHSSLSVLFFEYV

SEQ ID NO: 11015 - protein, 18 aa, Artificial Sequence
  Cyclic GFR-binding peptide
  MOD_RES (4)..(5): Xaa is C or S
ASPXXVPQDLSSLSILFF

SEQ ID NO: 11016 - protein, 17 aa, Artificial Sequence
  Cyclic GFR-binding peptide
KLSSLSILFFDKGVVTY

SEQ ID NO: 11017 - protein, 26 aa, Artificial Sequence
  Cyclic GFR-binding peptide
  MOD_RES (6)..(7): Xaa is C or S
HVPKPXXAPTKLSSLSVLFFDDSSNV

SEQ ID NO: 11018 - protein, 21 aa, Artificial Sequence
  Cyclic GFR-binding peptide
  MOD_RES (7)..(7): Xaa is C or S
NDEGLEXVPTEESSLSMLFFR

SEQ ID NO: 11019 - protein, 23 aa, Artificial Sequence
  Cyclic GFR-binding peptide
  MOD_RES (6)..(7): Xaa is C or S
SIPKAXXVPTELSSLSMLFFDEY

SEQ ID NO: 11020 - protein, 21 aa, Artificial Sequence
  Cyclic GFR-binding peptide
  MOD_RES (6)..(7): Xaa is C or S
RVPSTXXAPVKTSSLSMLFFD

SEQ ID NO: 11021 - protein, 24 aa, Artificial Sequence
  Cyclic GFR-binding peptide
  MOD_RES (6)..(7): Xaa is C or S
GSAGPXXTPTKMSSLSMLFFNDKQ

SEQ ID NO: 11022 - protein, 20 aa, Artificial Sequence
  Cyclic GFR-binding peptide
  MOD_RES (6)..(7): Xaa is C or S
RVPSTXXAPVKTSSLSMLFF

SEQ ID NO: 11023 - protein, 13 aa, Artificial Sequence
  Cyclic GFR-binding peptide
VSQDLSSLSILFF

SEQ ID NO: 11024 - protein, 27 aa, Artificial Sequence
  Cyclic GFR-binding peptide
  MOD_RES (6)..(7): Xaa is C or S
STPPTXXVPTRLSSLSILFFDSANNVV

SEQ ID NO: 11025 - protein, 24 aa, Artificial Sequence
  Cyclic GFR-binding peptide
  MOD_RES (6)..(7): Xaa is C or S
AAPASXXVPARLSSLSILFFDAAN

SEQ ID NO: 11026 - protein, 17 aa, Artificial Sequence
  Cyclic GFR-binding peptide
  MOD_RES (4)..(4): Xaa is C or S
KPTXAPTKLSSLSVLFF

SEQ ID NO: 11027 - protein, 19 aa, Artificial Sequence
  Cyclic GFR-binding peptide
SQDLSSLSILFFIGKTPKI

SEQ ID NO: 11028 - protein, 19 aa, Artificial Sequence
  Cyclic GFR-binding peptide
  MOD_RES (6)..(6): Xaa is C or S
VTKPTXAPTKLSSLSVLFF

SEQ ID NO: 11029 - protein, 18 aa, Artificial Sequence
  Cyclic GFR-binding peptide
  MOD_RES (4)..(5): Xaa is C or S
PASXXVPARLSSLSILFF

SEQ ID NO: 11030 - protein, 16 aa, Artificial Sequence
  Cyclic GFR-binding peptide
  MOD_RES (2)..(3): Xaa is C or S
TXXVPTRLSSLSILFF

SEQ ID NO: 11031 - protein, 18 aa, Artificial Sequence
  Cyclic GFR-binding peptide
  MOD_RES (4)..(5): Xaa is C or S
PKAXXVPTELSSLSMLFF

SEQ ID NO: 11032 - protein, 17 aa, Artificial Sequence
  Cyclic GFR-binding peptide
  MOD_RES (3)..(4): Xaa is C or S
ASXXVPARLSSLSILFF

SEQ ID NO: 11033 - protein, 23 aa, Artificial Sequence
  Cyclic GFR-binding peptide
  MOD_RES (6)..(7): Xaa is C or S
KASKAXXVPTKLSSLSILFFDKG

SEQ ID NO: 11034 - protein, 17 aa, Artificial Sequence
  Cyclic GFR-binding peptide
KLSSLSVLFFDSSNNVI

SEQ ID NO: 11035 - protein, 28 aa, Artificial Sequence
  Cyclic GFR-binding peptide
  MOD_RES (5)..(5): Xaa is C or S
SSVKXQPSRVHHSSLSVLFFEYVRKKPK

SEQ ID NO: 11036 - protein, 17 aa, Artificial Sequence
  Cyclic GFR-binding peptide
  MOD_RES (3)..(4): Xaa is C or S
APXXVPQALSSLSILFF

SEQ ID NO: 11037 - protein, 23 aa, Artificial Sequence
  Cyclic GFR-binding peptide
  MOD_RES (6)..(7): Xaa is C or S
KVGKAXXVPTKLSSLSVLFFDDM

SEQ ID NO: 11038 - protein, 22 aa, Artificial Sequence
  Cyclic GFR-binding peptide
  MOD_RES (6)..(7): Xaa is C or S
SIPKAXXVPTELSSLSMLFFDE

SEQ ID NO: 11039 - protein, 21 aa, Artificial Sequence
  Cyclic GFR-binding peptide
  MOD_RES (6)..(7): Xaa is C or S
SIPKAXXVPTELSSLSMLFFD

SEQ ID NO: 11040 - protein, 27 aa, Artificial Sequence
  Cyclic GFR-binding peptide
  MOD_RES (6)..(7): Xaa is C or S
GSAGPXXTPTKMSSLSMLFFNDKQQII

SEQ ID NO: 11041 - protein, 21 aa, Artificial Sequence
  Cyclic GFR-binding peptide
PTEESSLSMLFFRIKPHQGQH

SEQ ID NO: 11042 - protein, 19 aa, Artificial Sequence
  Cyclic GFR-binding peptide
  MOD_RES (5)..(6): Xaa is C or S
IPKAXXVPTELSSLSMLFF

SEQ ID NO: 11043 - protein, 19 aa, Artificial Sequence
  Cyclic GFR-binding peptide
  MOD_RES (5)..(6): Xaa is C or S
VPSTXXAPVKTSSLSMLFF

SEQ ID NO: 11044 - protein, 15 aa, Artificial Sequence
  Cyclic GFR-binding peptide
  MOD_RES (1)..(2): Xaa is C or S
XXAPTQLSSLSVLFF

SEQ ID NO: 11045 - protein, 27 aa, Artificial Sequence
  Cyclic GFR-binding peptide
  MOD_RES (6)..(7): Xaa is C or S
YVPKPXXAPTKLSSLSVLFFDDSSNVI

SEQ ID NO: 11046 - protein, 17 aa, Artificial Sequence
  Cyclic GFR-binding peptide
KTSSLSMLFFDNGRVLL

SEQ ID NO: 11047 - protein, 17 aa, Artificial Sequence
  Cyclic GFR-binding peptide
DLSSLSILFFIGKTPKI

SEQ ID NO: 11048 - protein, 15 aa, Artificial Sequence
  Cyclic GFR-binding peptide
SSLSMLFFNDKQQII

SEQ ID NO: 11049 - protein, 13 aa, Artificial Sequence
  Cyclic GFR-binding peptide
VPARLSSLSILFF

SEQ ID NO: 11050 - protein, 14 aa, Artificial Sequence
  Cyclic GFR-binding peptide
  MOD_RES (1)..(1): Xaa is C or S
XVPTRLSSLSILFF

SEQ ID NO: 11051 - protein, 15 aa, Artificial Sequence
  Cyclic GFR-binding peptide
  MOD_RES (1)..(2): Xaa is C or S
XXVPTKLSSLSILFF

SEQ ID NO: 11052 - protein, 20 aa, Artificial Sequence
  Cyclic GFR-binding peptide
  MOD_RES (6)..(7): Xaa is C or S
KASKAXXVPTKLSSLSILFF

SEQ ID NO: 11053 - protein, 20 aa, Artificial Sequence
  Cyclic GFR-binding peptide
  MOD_RES (6)..(7): Xaa is C or S
HVPKPXXAPTKLSSLSVLFF

SEQ ID NO: 11054 - protein, 16 aa, Artificial Sequence
  Cyclic GFR-binding peptide
LSSLSILFFDAANNVV

SEQ ID NO: 11055 - protein, 22 aa, Artificial Sequence
  Cyclic GFR-binding peptide
  MOD_RES (6)..(7): Xaa is C or S
AVPKAXXAPTKLSSLSVLFFDS

SEQ ID NO: 11056 - protein, 16 aa, Artificial Sequence
  Cyclic GFR-binding peptide
LSSLSILFFVGRTPKV

SEQ ID NO: 11057 - protein, 25 aa, Artificial Sequence
  Cyclic GFR-binding peptide
  MOD_RES (6)..(7): Xaa is C or S
KVGKAXXVPTKLSSLSVLFFDDMGV

SEQ ID NO: 11058 - protein, 21 aa, Artificial Sequence
  Cyclic GFR-binding peptide
  MOD_RES (6)..(7): Xaa is C or S
KVGKAXXVPTKLSSLSVLFFD

SEQ ID NO: 11059 - protein, 19 aa, Artificial Sequence
  Cyclic GFR-binding peptide
  MOD_RES (5)..(6): Xaa is C or S
SASPXXVSQDLSSLSILFF

SEQ ID NO: 11060 - protein, 16 aa, Artificial Sequence
  Cyclic GFR-binding peptide
  MOD_RES (2)..(3): Xaa is C or S
AXXAPTKLSSLSVLFF

SEQ ID NO: 11061 - protein, 24 aa, Artificial Sequence
  Cyclic GFR-binding peptide
  MOD_RES (6)..(7): Xaa is C or S
KIPKAXXVPTELSSLSMLFFDENE

SEQ ID NO: 11062 - protein, 25 aa, Artificial Sequence
  Cyclic GFR-binding peptide
  MOD_RES (6)..(7): Xaa is C or S
ASASPXXVPQDLSSLSILFFVGRTP

SEQ ID NO: 11063 - protein, 22 aa, Artificial Sequence
  Cyclic GFR-binding peptide
  MOD_RES (6)..(7): Xaa is C or S
RVPSTXXAPVKTSSLSMLFFDN

SEQ ID NO: 11064 - protein, 23 aa, Artificial Sequence
  Cyclic GFR-binding peptide
  MOD_RES (6)..(7): Xaa is C or S
ASAAPXXVPQALSSLSILFFVGR

SEQ ID NO: 11065 - protein, 16 aa, Artificial Sequence
  Cyclic GFR-binding peptide
LSSLSMLFFDENEKVV

SEQ ID NO: 11066 - protein, 18 aa, Artificial Sequence
  Cyclic GFR-binding peptide
HSSLSVLFFEYVRKKPKL

SEQ ID NO: 11067 - protein, 26 aa, Artificial Sequence
  Cyclic GFR-binding peptide
  MOD_RES (6)..(7): Xaa is C or S
KIPKAXXVPTELSSLSMLFFDENEKV

SEQ ID NO: 11068 - protein, 19 aa, Artificial Sequence
  Cyclic GFR-binding peptide
  MOD_RES (5)..(6): Xaa is C or S
VPKPXXAPTKLSSLSVLFF

SEQ ID NO: 11069 - protein, 17 aa, Artificial Sequence
  Cyclic GFR-binding peptide
  MOD_RES (3)..(4): Xaa is C or S
KAXXVPTKLSSLSVLFF

SEQ ID NO: 11070 - protein, 19 aa, Artificial Sequence
  Cyclic GFR-binding peptide
  MOD_RES (6)..(6): Xaa is C or S
DEGLEXVPTEESSLSMLFF

SEQ ID NO: 11071 - protein, 14 aa, Artificial Sequence
  Cyclic GFR-binding peptide
  MOD_RES (1)..(1): Xaa is C or S
XAPTKLSSLSVLFF

SEQ ID NO: 11072 - protein, 17 aa, Artificial Sequence
  Cyclic GFR-binding peptide
ELSSLSMLFFDENEKVV

SEQ ID NO: 11073 - protein, 27 aa, Artificial Sequence
  Cyclic GFR-binding peptide
  MOD_RES (6)..(7): Xaa is C or S
KASKAXXVPTKLSSLSILFFDKGVVTY

SEQ ID NO: 11074 - protein, 24 aa, Artificial Sequence
  Cyclic GFR-binding peptide
  MOD_RES (6)..(7): Xaa is C or S
ASASPXXVSQDLSSLSILFFIGKT

SEQ ID NO: 11075 - protein, 18 aa, Artificial Sequence
  Cyclic GFR-binding peptide
  MOD_RES (4)..(5): Xaa is C or S
GKAXXVPTKLSSLSVLFF

SEQ ID NO: 11076 - protein, 27 aa, Artificial Sequence
  Cyclic GFR-binding peptide
  MOD_RES (6)..(7): Xaa is C or S
ASAAPXXVPQALSSLSILFFVGRKPKV

SEQ ID NO: 11077 - protein, 20 aa, Artificial Sequence
  Cyclic GFR-binding peptide
  MOD_RES (6)..(7): Xaa is C or S
ASASPXXVSQDLSSLSILFF

SEQ ID NO: 11078 - protein, 24 aa, Artificial Sequence
  Cyclic GFR-binding peptide
  MOD_RES (6)..(7): Xaa is C or S
HVPKPXXAPTKLSSLSVLFFDDSS

SEQ ID NO: 11079 - protein, 18 aa, Artificial Sequence
  Cyclic GFR-binding peptide
TKLSSLSVLFFDDMGVPT

SEQ ID NO: 11080 - protein, 26 aa, Artificial Sequence
  Cyclic GFR-binding peptide
  MOD_RES (6)..(7): Xaa is C or S
ASAAPXXVPQALSSLSILFFVGRKPK

SEQ ID NO: 11081 - protein, 16 aa, Artificial Sequence
  Cyclic GFR-binding peptide
LSSLSILFFDSANNVV

SEQ ID NO: 11082 - protein, 13 aa, Artificial Sequence
  Cyclic GFR-binding peptide
VPTEESSLSMLFF

SEQ ID NO: 11083 - protein, 18 aa, Artificial Sequence
  Cyclic GFR-binding peptide
QALSSLSILFFVGRKPKV

SEQ ID NO: 11084 - protein, 22 aa, Artificial Sequence
  Cyclic GFR-binding peptide
  MOD_RES (6)..(7): Xaa is C or S
HVPKPXXAPTKLSSLSVLFFDD

SEQ ID NO: 11085 - protein, 25 aa, Artificial Sequence
  Cyclic GFR-binding peptide
  MOD_RES (7)..(7): Xaa is C or S
NDEGLEXVPTEESSLSMLFFRIKPH

SEQ ID NO: 11086 - protein, 17 aa, Artificial Sequence
  Cyclic GFR-binding peptide
  MOD_RES (3)..(4): Xaa is C or S
KAXXVPTELSSLSMLFF

SEQ ID NO: 11087 - protein, 21 aa, Artificial Sequence
  Cyclic GFR-binding peptide
  MOD_RES (7)..(7): Xaa is C or S
HVTKPTXAPTKLSSLSVLFFD

SEQ ID NO: 11088 - protein, 16 aa, Artificial Sequence
  Cyclic GFR-binding peptide
LSSLSVLFFDDMGVPT

SEQ ID NO: 11089 - protein, 16 aa, Artificial Sequence
  Cyclic GFR-binding peptide
  MOD_RES (2)..(3): Xaa is C or S
PXXVPQALSSLSILFF

SEQ ID NO: 11090 - protein, 20 aa, Artificial Sequence
  Cyclic GFR-binding peptide
  MOD_RES (6)..(7): Xaa is C or S
AVPKAXXAPTKLSSLSVLFF

SEQ ID NO: 11091 - protein, 19 aa, Artificial Sequence
  Cyclic GFR-binding peptide
  MOD_RES (5)..(6): Xaa is C or S
TPPTXXVPTRLSSLSILFF

SEQ ID NO: 11092 - protein, 21 aa, Artificial Sequence
  Cyclic GFR-binding peptide
  MOD_RES (5)..(5): Xaa is C or S
SSVKXQPSRVHHSSLSVLFFE

SEQ ID NO: 11093 - protein, 19 aa, Artificial Sequence
  Cyclic GFR-binding peptide
  MOD_RES (5)..(6): Xaa is C or S
ASKAXXVPTKLSSLSILFF

SEQ ID NO: 11094 - protein, 15 aa, Artificial Sequence
  Cyclic GFR-binding peptide
SSLSVLFFDSSNNVI

SEQ ID NO: 11095 - protein, 25 aa, Artificial Sequence
  Cyclic GFR-binding peptide
  MOD_RES (6)..(7): Xaa is C or S
KIPKAXXVPTELSSLSMLFFDENEK

SEQ ID NO: 11096 - protein, 15 aa, Artificial Sequence
  Cyclic GFR-binding peptide
  MOD_RES (2)..(2): Xaa is C or S
EXVPTEESSLSMLFF

SEQ ID NO: 11097 - protein, 21 aa, Artificial Sequence
  Cyclic GFR-binding peptide
  MOD_RES (6)..(7): Xaa is C or S
ASASPXXVPQDLSSLSILFFV

SEQ ID NO: 11098 - protein, 21 aa, Artificial Sequence
  Cyclic GFR-binding peptide
  MOD_RES (6)..(7): Xaa is C or S
TVPKPXXAPTQLSSLSVLFFD

SEQ ID NO: 11099 - protein, 21 aa, Artificial Sequence
  Cyclic GFR-binding peptide
  MOD_RES (6)..(7): Xaa is C or S
GSAGPXXTPTKMSSLSMLFFN

SEQ ID NO: 11100 - protein, 26 aa, Artificial Sequence
  Cyclic GFR-binding peptide
  MOD_RES (6)..(7): Xaa is C or S
SIPKAXXVPTELSSLSMLFFDEYDKV

SEQ ID NO: 11101 - protein, 14 aa, Artificial Sequence
  Cyclic GFR-binding peptide
  MOD_RES (1)..(1): Xaa is C or S
XAPVKTSSLSMLFF

SEQ ID NO: 11102 - protein, 17 aa, Artificial Sequence
  Cyclic GFR-binding peptide
  MOD_RES (3)..(4): Xaa is C or S
SPXXVPQDLSSLSILFF

SEQ ID NO: 11103 - protein, 15 aa, Artificial Sequence
  Cyclic GFR-binding peptide
  MOD_RES (14)..(15): Xaa is C or S
VKAIKVSRLDQSVXX

SEQ ID NO: 11104 - protein, 22 aa, Artificial Sequence
  Cyclic GFR-binding peptide
  MOD_RES (18)..(18): Xaa is C or S
YEYYVVPLPEHHVRSPQXKVSS

SEQ ID NO: 11105 - protein, 20 aa, Artificial Sequence
  Cyclic GFR-binding peptide
  MOD_RES (14)..(15): Xaa is C or S
VKAVKVSRLKTPAXXPKPVY

SEQ ID NO: 11106 - protein, 28 aa, Artificial Sequence
  Cyclic GFR-binding peptide
  MOD_RES (24)..(24): Xaa is C or S
IPKKRVIEYYVVPLPELQVQTPRXQVNR

SEQ ID NO: 11107 - protein, 23 aa, Artificial Sequence
  Cyclic GFR-binding peptide
  MOD_RES (17)..(18): Xaa is C or S
RGVIKRIQVPRLAQPVXXPAASA

SEQ ID NO: 11108 - protein, 19 aa, Artificial Sequence
  Cyclic GFR-binding peptide
  MOD_RES (14)..(15): Xaa is C or S
VKAVKVSRLQTPAXXPKPV

SEQ ID NO: 11109 - protein, 26 aa, Artificial Sequence
  Cyclic GFR-binding peptide
  MOD_RES (20)..(20): Xaa is C or S
QHPKIRYYLMTLPEEETPVXELGEDN

SEQ ID NO: 11110 - protein, 16 aa, Artificial Sequence
  Cyclic GFR-binding peptide
VVKENEDVKAMKVSRL

SEQ ID NO: 11111 - protein, 21 aa, Artificial Sequence
  Cyclic GFR-binding peptide
  MOD_RES (15)..(16): Xaa is C or S
DMIQMTINSLETPVXXAKPIK

SEQ ID NO: 11112 - protein, 18 aa, Artificial Sequence
  Cyclic GFR-binding peptide
IKPTKGIVKAIKVSRLDQ

SEQ ID NO: 11113 - protein, 17 aa, Artificial Sequence
  Cyclic GFR-binding peptide
  MOD_RES (14)..(15): Xaa is C or S
IKRIQVPRLAQPVXXPA

SEQ ID NO: 11114 - protein, 18 aa, Artificial Sequence
  Cyclic GFR-binding peptide
VVKDYEDMIQMTINSLET

SEQ ID NO: 11115 - protein, 22 aa, Artificial Sequence
  Cyclic GFR-binding peptide
  MOD_RES (16)..(17): Xaa is C or S
EDMIQMTINSLETPVXXAKPIS

SEQ ID NO: 11116 - protein, 14 aa, Artificial Sequence
  Cyclic GFR-binding peptide
  MOD_RES (14)..(14): Xaa is C or S
MIQMTINSLETPVX

SEQ ID NO: 11117 - protein, 13 aa, Artificial Sequence
  Cyclic GFR-binding peptide
VKAIKVSRLDQSV

SEQ ID NO: 11118 - protein, 24 aa, Artificial Sequence
  Cyclic GFR-binding peptide
  MOD_RES (18)..(19): Xaa is C or S
ENEDVKAMKVSRLETPVXXAKPIK

SEQ ID NO: 11119 - protein, 27 aa, Artificial Sequence
  Cyclic GFR-binding peptide
  MOD_RES (21)..(22): Xaa is C or S
VKPKRGVIKRIQVPRLAQPVXXPAASA

SEQ ID NO: 11120 - protein, 15 aa, Artificial Sequence
  Cyclic GFR-binding peptide
VKPKRGVIKRIQVPR

SEQ ID NO: 11121 - protein, 14 aa, Artificial Sequence
  Cyclic GFR-binding peptide
  MOD_RES (14)..(14): Xaa is C or S
MIQITINSLDQPVX

SEQ ID NO: 11122 - protein, 22 aa, Artificial Sequence
  Cyclic GFR-binding peptide
  MOD_RES (16)..(17): Xaa is C or S
GIMIQITINSLDQSVXXPSASA

SEQ ID NO: 11123 - protein, 23 aa, Artificial Sequence
  Cyclic GFR-binding peptide
  MOD_RES (17)..(18): Xaa is C or S
YEDMIQMTINSLETPVXXAKPIS

SEQ ID NO: 11124 - protein, 14 aa, Artificial Sequence
  Cyclic GFR-binding peptide
  MOD_RES (14)..(14): Xaa is C or S
YYLMTLPEEETPVX

SEQ ID NO: 11125 - protein, 18 aa, Artificial Sequence
  Cyclic GFR-binding peptide
  MOD_RES (14)..(14): Xaa is C or S
IKRVQVPRLKTPAXTPKT

SEQ ID NO: 11126 - protein, 17 aa, Artificial Sequence
  Cyclic GFR-binding peptide
VVKENEDMIQMTINSLE

SEQ ID NO: 11127 - protein, 14 aa, Artificial Sequence
  Cyclic GFR-binding peptide
  MOD_RES (14)..(14): Xaa is C or S
IKRMQVPRLETPVX

SEQ ID NO: 11128 - protein, 16 aa, Artificial Sequence
  Cyclic GFR-binding peptide
VVKENEDMIQMTINSL

SEQ ID NO: 11129 - protein, 17 aa, Artificial Sequence
  Cyclic GFR-binding peptide
  MOD_RES (14)..(15): Xaa is C or S
IKRVQVPRLQTPAXXPK

SEQ ID NO: 11130 - protein, 22 aa, Artificial Sequence
  Cyclic GFR-binding peptide
  MOD_RES (16)..(16): Xaa is C or S
DDIKRVQVPRLKTPAXTPKTVH

SEQ ID NO: 11131 - protein, 18 aa, Artificial Sequence
  Cyclic GFR-binding peptide
IKPTKGIMIQITINSLDQ

SEQ ID NO: 11132 - protein, 25 aa, Artificial Sequence
  Cyclic GFR-binding peptide
  MOD_RES (19)..(19): Xaa is C or S
NSSDDVKAVKVSRLKTPAXTPKTVH

SEQ ID NO: 11133 - protein, 17 aa, Artificial Sequence
  Cyclic GFR-binding peptide
  MOD_RES (14)..(15): Xaa is C or S
MIQITINSLAQPVXXPA

SEQ ID NO: 11134 - protein, 18 aa, Artificial Sequence
  Cyclic GFR-binding peptide
VVKDYEDVKAMKVSRLET

SEQ ID NO: 11135 - protein, 22 aa, Artificial Sequence
  Cyclic GFR-binding peptide
  MOD_RES (16)..(17): Xaa is C or S
EDIKRMQVPRLETPVXXAKPIK

SEQ ID NO: 11136 - protein, 18 aa, Artificial Sequence
  Cyclic GFR-binding peptide
  MOD_RES (14)..(15): Xaa is C or S
MIQMTINSLETPVXXAKP

SEQ ID NO: 11137 - protein, 23 aa, Artificial Sequence
  Cyclic GFR-binding peptide
  MOD_RES (19)..(19): Xaa is C or S
VYEYYLVTLPEHHVRSPQXKVSS

SEQ ID NO: 11138 - protein, 17 aa, Artificial Sequence
  Cyclic GFR-binding peptide
  MOD_RES (14)..(15): Xaa is C or S
VKAIKVSRLDQSVXXPS

SEQ ID NO: 11139 - protein, 21 aa, Artificial Sequence
  Cyclic GFR-binding peptide
  MOD_RES (15)..(15): Xaa is C or S
DIKRVQVPRLKTPAXTPKTVH

SEQ ID NO: 11140 - protein, 25 aa, Artificial Sequence
  Cyclic GFR-binding peptide
  MOD_RES (19)..(20): Xaa is C or S
KDYEDIKRMQVPRLETPVXXAKPIS

SEQ ID NO: 11141 - protein, 27 aa, Artificial Sequence
  Cyclic GFR-binding peptide
  MOD_RES (21)..(22): Xaa is C or S
IKPTKGIVKAIKVSRLDQSVXXPSASA

SEQ ID NO: 11142 - protein, 19 aa, Artificial Sequence
  Cyclic GFR-binding peptide
VVKDYEDVKAMKVSRLETP

SEQ ID NO: 11143 - protein, 13 aa, Artificial Sequence
  Cyclic GFR-binding peptide
IKRMQVPRLETPV

SEQ ID NO: 11144 - protein, 21 aa, Artificial Sequence
  Cyclic GFR-binding peptide
  MOD_RES (15)..(16): Xaa is C or S
IVKAIKVSRLDQSVXXPSASA

SEQ ID NO: 11145 - protein, 25 aa, Artificial Sequence
  Cyclic GFR-binding peptide
  MOD_RES (19)..(20): Xaa is C or S
KDYEDMIQMTINSLETPVXXAKPIS

SEQ ID NO: 11146 - protein, 19 aa, Artificial Sequence
  Cyclic GFR-binding peptide
  MOD_RES (14)..(15): Xaa is C or S
VKAIKVSRLDQSVXXPSAS

SEQ ID NO: 11147 - protein, 24 aa, Artificial Sequence
  Cyclic GFR-binding peptide
  MOD_RES (18)..(19): Xaa is C or S
TRGVVKAIKVSRLDQPVXXPSASA

SEQ ID NO: 11148 - protein, 19 aa, Artificial Sequence
  Cyclic GFR-binding peptide
FIPKKRVIEYYLVTLPELQ

SEQ ID NO: 11149 - protein, 14 aa, Artificial Sequence
  Cyclic GFR-binding peptide
  MOD_RES (14)..(14): Xaa is C or S
YYVMPLPEEETPVX

SEQ ID NO: 11150 - protein, 19 aa, Artificial Sequence
  Cyclic GFR-binding peptide
  MOD_RES (14)..(15): Xaa is C or S
VKAMKVSRLETPVXXAKPI

SEQ ID NO: 11151 - protein, 26 aa, Artificial Sequence
  Cyclic GFR-binding peptide
  MOD_RES (20)..(20): Xaa is C or S
VNSSDDVKAVKVSRLKTPAXTPKTVH

SEQ ID NO: 11152 - protein, 24 aa, Artificial Sequence
  Cyclic GFR-binding peptide
  MOD_RES (18)..(19): Xaa is C or S
ENEDMIQMTINSLETPVXXAKPIK

SEQ ID NO: 11153 - protein, 28 aa, Artificial Sequence
  Cyclic GFR-binding peptide
  MOD_RES (22)..(22): Xaa is C or S
QGQHPKIRYYVMPLPEEETPVXELGEDN

SEQ ID NO: 11154 - protein, 27 aa, Artificial Sequence
  Cyclic GFR-binding peptide
  MOD_RES (23)..(23): Xaa is C or S
PKKRVIEYYVVPLPELQVQTPRXQVNR

SEQ ID NO: 11155 - protein, 17 aa, Artificial Sequence
  Cyclic GFR-binding peptide
IVNSSDDIKRVQVPRLK

SEQ ID NO: 11156 - protein, 14 aa, Artificial Sequence
  Cyclic GFR-binding peptide
  MOD_RES (14)..(14): Xaa is C or S
VKAIKVSRLAQPVX

SEQ ID NO: 11157 - protein, 16 aa, Artificial Sequence
  Cyclic GFR-binding peptide
IVNSSDDIKRVQVPRL

SEQ ID NO: 11158 - protein, 15 aa, Artificial Sequence
  Cyclic GFR-binding peptide
  MOD_RES (14)..(15): Xaa is C or S
IKRMQVPRLETPVXX

SEQ ID NO: 11159 - protein, 27 aa, Artificial Sequence
  Cyclic GFR-binding peptide
  MOD_RES (21)..(22): Xaa is C or S
IKPTKGIMIQITINSLDQSVXXPSASA

SEQ ID NO: 11160 - protein, 26 aa, Artificial Sequence
  Cyclic GFR-binding peptide
  MOD_RES (20)..(20): Xaa is C or S
VNSSDDIKRVQVPRLKTPAXTPKTVH

SEQ ID NO: 11161 - protein, 14 aa, Artificial Sequence
  Cyclic GFR-binding peptide
  MOD_RES (14)..(14): Xaa is C or S
IKRIQVPRLDQSVX

SEQ ID NO: 11162 - protein, 15 aa, Artificial Sequence
  Cyclic GFR-binding peptide
  MOD_RES (14)..(14): Xaa is C or S
YYLMTLPEEETPVXE

SEQ ID NO: 11163 - protein, 16 aa, Artificial Sequence
  Cyclic GFR-binding peptide
  MOD_RES (14)..(15): Xaa is C or S
VKAMKVSRLETPVXXA

SEQ ID NO: 11164 - protein, 17 aa, Artificial Sequence
  Cyclic GFR-binding peptide
IVNSSDDIKRVQVPRLQ

SEQ ID NO: 11165 - protein, 21 aa, Artificial Sequence
  Cyclic GFR-binding peptide
  MOD_RES (15)..(16): Xaa is C or S
VMIQITINSLAQPVXXPAASA

SEQ ID NO: 11166 - protein, 13 aa, Artificial Sequence
  Cyclic GFR-binding peptide
VKAVKVSRLQTPA

SEQ ID NO: 11167 - protein, 23 aa, Artificial Sequence
  Cyclic GFR-binding peptide
  MOD_RES (17)..(18): Xaa is C or S
YEDVKAMKVSRLETPVXXAKPIS

SEQ ID NO: 11168 - protein, 19 aa, Artificial Sequence
  Cyclic GFR-binding peptide
VVKDYEDMIQMTINSLETP

SEQ ID NO: 11169 - protein, 15 aa, Artificial Sequence
  Cyclic GFR-binding peptide
  MOD_RES (14)..(15): Xaa is C or S
VKAVKVSRLQTPAXX

SEQ ID NO: 11170 - protein, 25 aa, Artificial Sequence
  Cyclic GFR-binding peptide
  MOD_RES (19)..(19): Xaa is C or S
NSSDDMIQVTINSLKTPAXTPKTVH

SEQ ID NO: 11171 - protein, 23 aa, Artificial Sequence
  Cyclic GFR-binding peptide
  MOD_RES (19)..(19): Xaa is C or S
VYEYYVVPLPEHHVRSPQXKVSS

SEQ ID NO: 11172 - protein, 17 aa, Artificial Sequence
  Cyclic GFR-binding peptide
  MOD_RES (14)..(15): Xaa is C or S
MIQITINSLDQPVXXPS

SEQ ID NO: 11173 - protein, 24 aa, Artificial Sequence
  Cyclic GFR-binding peptide
  MOD_RES (18)..(19): Xaa is C or S
TRGVMIQITINSLDQPVXXPSASA

SEQ ID NO: 11174 - protein, 21 aa, Artificial Sequence
  Cyclic GFR-binding peptide
  MOD_RES (15)..(16): Xaa is C or S
DIKRMQVPRLETPVXXAKPIK

SEQ ID NO: 11175 - protein, 13 aa, Artificial Sequence
  Cyclic GFR-binding peptide
IKRIQVPRLDQPV

SEQ ID NO: 11176 - protein, 15 aa, Artificial Sequence
  Cyclic GFR-binding peptide
  MOD_RES (14)..(15): Xaa is C or S
IKRIQVPRLDQPVXX

SEQ ID NO: 11177 - protein, 15 aa, Artificial Sequence
  Cyclic GFR-binding peptide
  MOD_RES (14)..(15): Xaa is C or S
MIQMTINSLETPVXX

SEQ ID NO: 11178 - protein, 17 aa, Artificial Sequence
  Cyclic GFR-binding peptide
VKPTRGVIKRIQVPRLD

SEQ ID NO: 11179 - protein, 13 aa, Artificial Sequence
  Cyclic GFR-binding peptide
YYLMTLPEEETPV

SEQ ID NO: 11180 - protein, 18 aa, Artificial Sequence
  Cyclic GFR-binding peptide
VKPKRGVMIQITINSLAQ

SEQ ID NO: 11181 - protein, 16 aa, Artificial Sequence
  Cyclic GFR-binding peptide
IKPTKGIIKRIQVPRL

SEQ ID NO: 11182 - protein, 22 aa, Artificial Sequence
  Cyclic GFR-binding peptide
  MOD_RES (18)..(18): Xaa is C or S
YEYYLVTLPEHHVRSPQXKVSS

SEQ ID NO: 11183 - protein, 15 aa, Artificial Sequence
  Cyclic GFR-binding peptide
VKPTRGVIKRIQVPR

SEQ ID NO: 11184 - protein, 17 aa, Artificial Sequence
  Cyclic GFR-binding peptide
  MOD_RES (14)..(15): Xaa is C or S
VKAVKVSRLQTPAXXPK

SEQ ID NO: 11185 - protein, 15 aa, Artificial Sequence
  Cyclic GFR-binding peptide
  MOD_RES (14)..(15): Xaa is C or S
VKAIKVSRLDQPVXX

SEQ ID NO: 11186 - protein, 19 aa, Artificial Sequence
  Cyclic GFR-binding peptide
  MOD_RES (14)..(15): Xaa is C or S
IKRMQVPRLETPVXXAKPI

SEQ ID NO: 11187 - protein, 26 aa, Artificial Sequence
  Cyclic GFR-binding peptide
  MOD_RES (20)..(21): Xaa is C or S
VKDYEDVKAMKVSRLETPVXXAKPIS

SEQ ID NO: 11188 - protein, 18 aa, Artificial Sequence
  Cyclic GFR-binding peptide
LKPKKRVYEYYLVTLPEH

SEQ ID NO: 11189 - protein, 18 aa, Artificial Sequence
  Cyclic GFR-binding peptide
VKPKRGVVKAIKVSRLAQ

SEQ ID NO: 11190 - protein, 18 aa, Artificial Sequence
  Cyclic GFR-binding peptide
  MOD_RES (14)..(14): Xaa is C or S
VKAVKVSRLKTPAXTPKT

SEQ ID NO: 11191 - protein, 17 aa, Artificial Sequence
  Cyclic GFR-binding peptide
  MOD_RES (14)..(15): Xaa is C or S
IKRIQVPRLDQSVXXPS

SEQ ID NO: 11192 - protein, 26 aa, Artificial Sequence
  Cyclic GFR-binding peptide
  MOD_RES (20)..(21): Xaa is C or S
KPTKGIMIQITINSLDQSVXXPSASA

SEQ ID NO: 11193 - protein, 19 aa, Artificial Sequence
  Cyclic GFR-binding peptide
  MOD_RES (14)..(15): Xaa is C or S
IKRIQVPRLDQPVXXPSAS

SEQ ID NO: 11194 - protein, 16 aa, Artificial Sequence
  Cyclic GFR-binding peptide
  MOD_RES (14)..(14): Xaa is C or S
VKAVKVSRLKTPAXTP

SEQ ID NO: 11195 - protein, 22 aa, Artificial Sequence
  Cyclic GFR-binding peptide
  MOD_RES (16)..(17): Xaa is C or S
GVIKRIQVPRLAQPVXXPAASA

SEQ ID NO: 11196 - protein, 21 aa, Artificial Sequence
  Cyclic GFR-binding peptide
  MOD_RES (15)..(16): Xaa is C or S
VIKRIQVPRLAQPVXXPAASA

SEQ ID NO: 11197 - protein, 15 aa, Artificial Sequence
  Cyclic GFR-binding peptide
VVKENEDVKAMKVSR

SEQ ID NO: 11198 - protein, 17 aa, Artificial Sequence
  Cyclic GFR-binding peptide
  MOD_RES (14)..(14): Xaa is C or S
YYLMTLPEEETPVXELG

SEQ ID NO: 11199 - protein, 16 aa, Artificial Sequence
  Cyclic GFR-binding peptide
  MOD_RES (14)..(15): Xaa is C or S
IKRVQVPRLKTPAXXP

SEQ ID NO: 11200 - protein, 13 aa, Artificial Sequence
  Cyclic GFR-binding peptide
VKAIKVSRLDQPV

SEQ ID NO: 11201 - protein, 22 aa, Artificial Sequence
  Cyclic GFR-binding peptide
  MOD_RES (16)..(17): Xaa is C or S
GVMIQITINSLAQPVXXPAASA

SEQ ID NO: 11202 - protein, 15 aa, Artificial Sequence
  Cyclic GFR-binding peptide
VVKDYEDVKAMKVSR

SEQ ID NO: 11203 - protein, 18 aa, Artificial Sequence
  Cyclic GFR-binding peptide
LKPKKRVYEYYVVPLPEH

SEQ ID NO: 11204 - protein, 15 aa, Artificial Sequence
  Cyclic GFR-binding peptide
IVNSSDDIKRVQVPR

SEQ ID NO: 11205 - protein, 26 aa, Artificial Sequence
  Cyclic GFR-binding peptide
  MOD_RES (20)..(21): Xaa is C or S
KPTRGVMIQITINSLDQPVXXPSASA

SEQ ID NO: 11206 - protein, 16 aa, Artificial Sequence
  Cyclic GFR-binding peptide
  MOD_RES (14)..(15): Xaa is C or S
VKAVKVSRLKTPAXXP

SEQ ID NO: 11207 - protein, 23 aa, Artificial Sequence
  Cyclic GFR-binding peptide
  MOD_RES (17)..(18): Xaa is C or S
SDDVKAVKVSRLKTPAXXPKPVY

SEQ ID NO: 11208 - protein, 17 aa, Artificial Sequence
  Cyclic GFR-binding peptide
  MOD_RES (14)..(15): Xaa is C or S
MIQITINSLDQSVXXPS

SEQ ID NO: 11209 - protein, 16 aa, Artificial Sequence
  Cyclic GFR-binding peptide
  MOD_RES (14)..(14): Xaa is C or S
IKRVQVPRLKTPAXTP

SEQ ID NO: 11210 - protein, 18 aa, Artificial Sequence
  Cyclic GFR-binding peptide
VKPTRGVVKAIKVSRLDQ

SEQ ID NO: 11211 - protein, 25 aa, Artificial Sequence
  Cyclic GFR-binding peptide
  MOD_RES (19)..(20): Xaa is C or S
KDYEDVKAMKVSRLETPVXXAKPIS

SEQ ID NO: 11212 - protein, 15 aa, Artificial Sequence
  Cyclic GFR-binding peptide
  MOD_RES (14)..(15): Xaa is C or S
VKAIKVSRLAQPVXX

SEQ ID NO: 11213 - protein, 13 aa, Artificial Sequence
  Cyclic GFR-binding peptide
MIQMTINSLETPV

SEQ ID NO: 11214 - protein, 29 aa, Artificial Sequence
  Cyclic GFR-binding peptide
  MOD_RES (25)..(25): Xaa is C or S
FIPKKRVIEYYVVPLPELQVQTPRXQVNR

SEQ ID NO: 11215 - protein, 26 aa, Artificial Sequence
  Cyclic GFR-binding peptide
  MOD_RES (20)..(21): Xaa is C or S
VNSSDDVKAVKVSRLKTPAXXPKPVY

SEQ ID NO: 11216 - protein, 15 aa, Artificial Sequence
  Cyclic GFR-binding peptide
  MOD_RES (14)..(15): Xaa is C or S
IKRIQVPRLDQSVXX

SEQ ID NO: 11217 - protein, 20 aa, Artificial Sequence
  Cyclic GFR-binding peptide
  MOD_RES (14)..(15): Xaa is C or S
IKRVQVPRLKTPAXXPKPVY

SEQ ID NO: 11218 - protein, 22 aa, Artificial Sequence
  Cyclic GFR-binding peptide
  MOD_RES (16)..(16): Xaa is C or S
DDMIQVTINSLKTPAXTPKTVH

SEQ ID NO: 11219 - protein, 24 aa, Artificial Sequence
  Cyclic GFR-binding peptide
  MOD_RES (18)..(18): Xaa is C or S
SSDDIKRVQVPRLKTPAXTPKTVH

SEQ ID NO: 11220 - protein, 26 aa, Artificial Sequence
  Cyclic GFR-binding peptide
  MOD_RES (20)..(21): Xaa is C or S
VNSSDDIKRVQVPRLKTPAXXPKPVY

SEQ ID NO: 11221 - protein, 15 aa, Artificial Sequence
  Cyclic GFR-binding peptide
VVKDYEDMIQMTINS

SEQ ID NO: 11222 - protein, 14 aa, Artificial Sequence
  Cyclic GFR-binding peptide
  MOD_RES (14)..(14): Xaa is C or S
VKAIKVSRLDQSVX

SEQ ID NO: 11223 - protein, 27 aa, Artificial Sequence
  Cyclic GFR-binding peptide
  MOD_RES (21)..(22): Xaa is C or S
IVNSSDDIKRVQVPRLKTPAXXPKPVY

SEQ ID NO: 11224 - protein, 26 aa, Artificial Sequence
  Cyclic GFR-binding peptide
  MOD_RES (22)..(22): Xaa is C or S
KKRVIEYYVVPLPELQVQTPRXQVNR

SEQ ID NO: 11225 - protein, 13 aa, Artificial Sequence
  Cyclic GFR-binding peptide
IKRIQVPRLDQSV

SEQ ID NO: 11226 - protein, 19 aa, Artificial Sequence
  Cyclic GFR-binding peptide
  MOD_RES (14)..(15): Xaa is C or S
MIQITINSLAQPVXXPAAS

SEQ ID NO: 11227 - protein, 18 aa, Artificial Sequence
  Cyclic GFR-binding peptide
VKPTRGVMIQITINSLDQ

SEQ ID NO: 11228 - protein, 26 aa, Artificial Sequence
  Cyclic GFR-binding peptide
  MOD_RES (20)..(21): Xaa is C or S
KPKRGVVKAIKVSRLAQPVXXPAASA

SEQ ID NO: 11229 - protein, 17 aa, Artificial Sequence
  Cyclic GFR-binding peptide
  MOD_RES (14)..(15): Xaa is C or S
IKRIQVPRLDQPVXXPS

SEQ ID NO: 11230 - protein, 13 aa, Artificial Sequence
  Cyclic GFR-binding peptide
YYVMPLPEEETPV

SEQ ID NO: 11231 - protein, 22 aa, Artificial Sequence
  Cyclic GFR-binding peptide
  MOD_RES (16)..(17): Xaa is C or S
EDIKRMQVPRLETPVXXAKPIS

SEQ ID NO: 11232 - protein, 13 aa, Artificial Sequence
  Cyclic GFR-binding peptide
VKAIKVSRLAQPV

SEQ ID NO: 11233 - protein, 19 aa, Artificial Sequence
  Cyclic GFR-binding peptide
VVKENEDIKRMQVPRLETP

SEQ ID NO: 11234 - protein, 19 aa, Artificial Sequence
  Cyclic GFR-binding peptide
  MOD_RES (14)..(15): Xaa is C or S
VKAIKVSRLDQPVXXPSAS

SEQ ID NO: 11235 - protein, 26 aa, Artificial Sequence
  Cyclic GFR-binding peptide
  MOD_RES (20)..(21): Xaa is C or S
VNSSDDIKRVQVPRLQTPAXXPKPVT

SEQ ID NO: 11236 - protein, 21 aa, Artificial Sequence
  Cyclic GFR-binding peptide
  MOD_RES (17)..(17): Xaa is C or S
EYYLVTLPEHHVRSPQXKVSS

SEQ ID NO: 11237 - protein, 21 aa, Artificial Sequence
  Cyclic GFR-binding peptide
  MOD_RES (15)..(15): Xaa is C or S
DMIQVTINSLKTPAXTPKTVH

SEQ ID NO: 11238 - protein, 17 aa, Artificial Sequence
  Cyclic GFR-binding peptide
  MOD_RES (14)..(14): Xaa is C or S
YYVMPLPEEETPVXELG

SEQ ID NO: 11239 - protein, 23 aa, Artificial Sequence
  Cyclic GFR-binding peptide
  MOD_RES (17)..(18): Xaa is C or S
SDDMIQVTINSLKTPAXXPKPVY

SEQ ID NO: 11240 - protein, 25 aa, Artificial Sequence
  Cyclic GFR-binding peptide
  MOD_RES (19)..(20): Xaa is C or S
PTKGIIKRIQVPRLDQSVXXPSASA

SEQ ID NO: 11241 - protein, 20 aa, Artificial Sequence
  Cyclic GFR-binding peptide
  MOD_RES (14)..(15): Xaa is C or S
MIQMTINSLETPVXXAKPIS

SEQ ID NO: 11242 - protein, 21 aa, Artificial Sequence
  Cyclic GFR-binding peptide
HQGQHPKIRYYLMTLPEEETP

SEQ ID NO: 11243 - protein, 17 aa, Artificial Sequence
  Cyclic GFR-binding peptide
  MOD_RES (14)..(15): Xaa is C or S
VKAVKVSRLKTPAXXPK

SEQ ID NO: 11244 - protein, 15 aa, Artificial Sequence
  Cyclic GFR-binding peptide
  MOD_RES (14)..(14): Xaa is C or S
MIQVTINSLKTPAXT

SEQ ID NO: 11245 - protein, 25 aa, Artificial Sequence
  Cyclic GFR-binding peptide
  MOD_RES (21)..(21): Xaa is C or S
KRVYEYYVVPLPEHHVRSPQXKVSS

SEQ ID NO: 11246 - protein, 20 aa, Artificial Sequence
  Cyclic GFR-binding peptide
  MOD_RES (14)..(15): Xaa is C or S
VKAIKVSRLAQPVXXPAASA

SEQ ID NO: 11247 - protein, 27 aa, Artificial Sequence
  Cyclic GFR-binding peptide
  MOD_RES (21)..(22): Xaa is C or S
IVNSSDDMIQVTINSLKTPAXXPKPVY

SEQ ID NO: 11248 - protein, 23 aa, Artificial Sequence
  Cyclic GFR-binding peptide
  MOD_RES (17)..(18): Xaa is C or S
RGVIKRIQVPRLDQPVXXPSASA

SEQ ID NO: 11249 - protein, 27 aa, Artificial Sequence
  Cyclic GFR-binding peptide
  MOD_RES (23)..(23): Xaa is C or S
PKKRVIEYYLVTLPELQVQTPRXQVNR

SEQ ID NO: 11250 - protein, 22 aa, Artificial Sequence
  Cyclic GFR-binding peptide
  MOD_RES (16)..(17): Xaa is C or S
GVIKRIQVPRLDQPVXXPSASA

SEQ ID NO: 11251 - protein, 23 aa, Artificial Sequence
  Cyclic GFR-binding peptide
  MOD_RES (17)..(18): Xaa is C or S
SDDMIQVTINSLQTPAXXPKPVT

SEQ ID NO: 11252 - protein, 17 aa, Artificial Sequence
  Cyclic GFR-binding peptide
IKPTKGIIKRIQVPRLD

SEQ ID NO: 11253 - protein, 20 aa, Artificial Sequence
  Cyclic GFR-binding peptide
  MOD_RES (14)..(15): Xaa is C or S
MIQVTINSLKTPAXXPKPVY

SEQ ID NO: 11254 - protein, 18 aa, Artificial Sequence
  Cyclic GFR-binding peptide
  MOD_RES (14)..(15): Xaa is C or S
IKRIQVPRLDQPVXXPSA

SEQ ID NO: 11255 - protein, 17 aa, Artificial Sequence
  Cyclic GFR-binding peptide
  MOD_RES (16)..(16): Xaa is C or S
YYLVTLPELQVQTPRXQ

SEQ ID NO: 11256 - protein, 23 aa, Artificial Sequence
  Cyclic GFR-binding peptide
  MOD_RES (17)..(17): Xaa is C or S
SDDIKRVQVPRLKTPAXTPKTVH

SEQ ID NO: 11257 - protein, 18 aa, Artificial Sequence
  Cyclic GFR-binding peptide
  MOD_RES (16)..(16): Xaa is C or S
YYLVTLPELQVQTPRXQV

SEQ ID NO: 11258 - protein, 23 aa, Artificial Sequence
  Cyclic GFR-binding peptide
  MOD_RES (17)..(18): Xaa is C or S
NEDIKRMQVPRLETPVXXAKPIK

SEQ ID NO: 11259 - protein, 18 aa, Artificial Sequence
  Cyclic GFR-binding peptide
IVNSSDDMIQVTINSLKT

SEQ ID NO: 11260 - protein, 20 aa, Artificial Sequence
  Cyclic GFR-binding peptide
  MOD_RES (16)..(16): Xaa is C or S
YYLVTLPELQVQTPRXQVNR

SEQ ID NO: 11261 - protein, 16 aa, Artificial Sequence
  Cyclic GFR-binding peptide
VKPTRGVVKAIKVSRL

SEQ ID NO: 11262 - protein, 22 aa, Artificial Sequence
  Cyclic GFR-binding peptide
  MOD_RES (16)..(17): Xaa is C or S
DDMIQVTINSLKTPAXXPKPVY

SEQ ID NO: 11263 - protein, 17 aa, Artificial Sequence
  Cyclic GFR-binding peptide
HQGQHPKIRYYLMTLPE

SEQ ID NO: 11264 - protein, 14 aa, Artificial Sequence
  Cyclic GFR-binding peptide
  MOD_RES (14)..(14): Xaa is C or S
MIQVTINSLQTPAX

SEQ ID NO: 11265 - protein, 18 aa, Artificial Sequence
  Cyclic GFR-binding peptide
IVNSSDDMIQVTINSLQT

SEQ ID NO: 11266 - protein, 27 aa, Artificial Sequence
  Cyclic GFR-binding peptide
  MOD_RES (21)..(22): Xaa is C or S
VKPTRGVMIQITINSLDQPVXXPSASA

SEQ ID NO: 11267 - protein, 19 aa, Artificial Sequence
  Cyclic GFR-binding peptide
  MOD_RES (14)..(15): Xaa is C or S
MIQITINSLDQPVXXPSAS

SEQ ID NO: 11268 - protein, 16 aa, Artificial Sequence
  Cyclic GFR-binding peptide
VKPTRGVIKRIQVPRL

SEQ ID NO: 11269 - protein, 17 aa, Artificial Sequence
  Cyclic GFR-binding peptide
  MOD_RES (14)..(15): Xaa is C or S
VKAIKVSRLAQPVXXPA

SEQ ID NO: 11270 - protein, 13 aa, Artificial Sequence
  Cyclic GFR-binding peptide
YYLVTLPEHHVRS

SEQ ID NO: 11271 - protein, 19 aa, Artificial Sequence
  Cyclic GFR-binding peptide
  MOD_RES (14)..(15): Xaa is C or S
MIQVTINSLQTPAXXPKPV

SEQ ID NO: 11272 - protein, 22 aa, Artificial Sequence
  Cyclic GFR-binding peptide
  MOD_RES (16)..(17): Xaa is C or S
DDVKAVKVSRLKTPAXXPKPVY

SEQ ID NO: 11273 - protein, 27 aa, Artificial Sequence
  Cyclic GFR-binding peptide
  MOD_RES (21)..(22): Xaa is C or S
VKPTRGVIKRIQVPRLDQPVXXPSASA

SEQ ID NO: 11274 - protein, 22 aa, Artificial Sequence
  Cyclic GFR-binding peptide
  MOD_RES (16)..(17): Xaa is C or S
GVVKAIKVSRLDQPVXXPSASA

SEQ ID NO: 11275 - protein, 20 aa, Artificial Sequence
  Cyclic GFR-binding peptide
  MOD_RES (14)..(15): Xaa is C or S
IKRVQVPRLQTPAXXPKPVT

SEQ ID NO: 11276 - protein, 16 aa, Artificial Sequence
  Cyclic GFR-binding peptide
  MOD_RES (14)..(15): Xaa is C or S
MIQVTINSLKTPAXXP

SEQ ID NO: 11277 - protein, 19 aa, Artificial Sequence
  Cyclic GFR-binding peptide
  MOD_RES (14)..(15): Xaa is C or S
IKRVQVPRLQTPAXXPKPV

SEQ ID NO: 11278 - protein, 20 aa, Artificial Sequence
  Cyclic GFR-binding peptide
  MOD_RES (16)..(16): Xaa is C or S
YYLVTLPEHHVRSPQXKVSS

SEQ ID NO: 11279 - protein, 26 aa, Artificial Sequence
  Cyclic GFR-binding peptide
  MOD_RES (20)..(21): Xaa is C or S
VNSSDDVKAVKVSRLQTPAXXPKPVT

SEQ ID NO: 11280 - protein, 15 aa, Artificial Sequence
  Cyclic GFR-binding peptide
  MOD_RES (14)..(15): Xaa is C or S
MIQVTINSLQTPAXX

SEQ ID NO: 11281 - protein, 16 aa, Artificial Sequence
  Cyclic GFR-binding peptide
VKPKRGVIKRIQVPRL

SEQ ID NO: 11282 - protein, 16 aa, Artificial Sequence
  Cyclic GFR-binding peptide
  MOD_RES (14)..(15): Xaa is C or S
IKRIQVPRLDQSVXXP

SEQ ID NO: 11283 - protein, 13 aa, Artificial Sequence
  Cyclic GFR-binding peptide
MIQITINSLDQSV

SEQ ID NO: 11284 - protein, 27 aa, Artificial Sequence
  Cyclic GFR-binding peptide
  MOD_RES (21)..(21): Xaa is C or S
IVNSSDDVKAVKVSRLKTPAXTPKTVH

SEQ ID NO: 11285 - protein, 18 aa, Artificial Sequence
  Cyclic GFR-binding peptide
  MOD_RES (16)..(16): Xaa is C or S
YYVVPLPELQVQTPRXQV

SEQ ID NO: 11286 - protein, 19 aa, Artificial Sequence
  Cyclic GFR-binding peptide
  MOD_RES (16)..(16): Xaa is C or S
YYVVPLPEHHVRSPQXKVS

SEQ ID NO: 11287 - protein, 25 aa, Artificial Sequence
  Cyclic GFR-binding peptide
  MOD_RES (19)..(19): Xaa is C or S
HPKIRYYVMPLPEEETPVXELGEDN

SEQ ID NO: 11288 - protein, 15 aa, Artificial Sequence
  Cyclic GFR-binding peptide
VVKENEDIKRMQVPR

SEQ ID NO: 11289 - protein, 23 aa, Artificial Sequence
  Cyclic GFR-binding peptide
  MOD_RES (17)..(18): Xaa is C or S
SDDIKRVQVPRLQTPAXXPKPVT

SEQ ID NO: 11290 - protein, 19 aa, Artificial Sequence
  Cyclic GFR-binding peptide
IVNSSDDIKRVQVPRLKTP

SEQ ID NO: 11291 - protein, 18 aa, Artificial Sequence
  Cyclic GFR-binding peptide
  MOD_RES (14)..(15): Xaa is C or S
MIQITINSLDQPVXXPSA

SEQ ID NO: 11292 - protein, 19 aa, Artificial Sequence
  Cyclic GFR-binding peptide
IVNSSDDIKRVQVPRLQTP

SEQ ID NO: 11293 - protein, 16 aa, Artificial Sequence
  Cyclic GFR-binding peptide
  MOD_RES (14)..(14): Xaa is C or S
MIQVTINSLKTPAXTP

SEQ ID NO: 11294 - protein, 16 aa, Artificial Sequence
  Cyclic GFR-binding peptide
VVKDYEDMIQMTINSL

SEQ ID NO: 11295 - protein, 18 aa, Artificial Sequence
  Cyclic GFR-binding peptide
HQGQHPKIRYYLMTLPEE

SEQ ID NO: 11296 - protein, 22 aa, Artificial Sequence
  Cyclic GFR-binding peptide
  MOD_RES (16)..(17): Xaa is C or S
DDIKRVQVPRLKTPAXXPKPVY

SEQ ID NO: 11297 - protein, 13 aa, Artificial Sequence
  Cyclic GFR-binding peptide
IKRIQVPRLAQPV

SEQ ID NO: 11298 - protein, 26 aa, Artificial Sequence
  Cyclic GFR-binding peptide
  MOD_RES (20)..(21): Xaa is C or S
VKENEDMIQMTINSLETPVXXAKPIK

SEQ ID NO: 11299 - protein, 17 aa, Artificial Sequence
  Cyclic GFR-binding peptide
VVKDYEDVKAMKVSRLE

SEQ ID NO: 11300 - protein, 23 aa, Artificial Sequence
  Cyclic GFR-binding peptide
  MOD_RES (17)..(18): Xaa is C or S
SDDIKRVQVPRLKTPAXXPKPVY

SEQ ID NO: 11301 - protein, 19 aa, Artificial Sequence
  Cyclic GFR-binding peptide
  MOD_RES (14)..(15): Xaa is C or S
MIQVTINSLKTPAXXPKPV

SEQ ID NO: 11302 - protein, 23 aa, Artificial Sequence
  Cyclic GFR-binding peptide
  MOD_RES (17)..(18): Xaa is C or S
RGVVKAIKVSRLDQPVXXPSASA

SEQ ID NO: 11303 - protein, 18 aa, Artificial Sequence
  Cyclic GFR-binding peptide
  MOD_RES (14)..(15): Xaa is C or S
VKAVKVSRLQTPAXXPKP

SEQ ID NO: 11304 - protein, 19 aa, Artificial Sequence
  Cyclic GFR-binding peptide
IVNSSDDMIQVTINSLKTP

SEQ ID NO: 11305 - protein, 27 aa, Artificial Sequence
  Cyclic GFR-binding peptide
  MOD_RES (21)..(22): Xaa is C or S
IVNSSDDIKRVQVPRLQTPAXXPKPVT

SEQ ID NO: 11306 - protein, 17 aa, Artificial Sequence
  Cyclic GFR-binding peptide
VVKDYEDIKRMQVPRLE

SEQ ID NO: 11307 - protein, 19 aa, Artificial Sequence
  Cyclic GFR-binding peptide
IVNSSDDMIQVTINSLQTP

SEQ ID NO: 11308 - protein, 20 aa, Artificial Sequence
  Cyclic GFR-binding peptide
  MOD_RES (14)..(15): Xaa is C or S
MIQITINSLDQSVXXPSASA

SEQ ID NO: 11309 - protein, 27 aa, Artificial Sequence
  Cyclic GFR-binding peptide
  MOD_RES (21)..(22): Xaa is C or S
VVKDYEDVKAMKVSRLETPVXXAKPIS

SEQ ID NO: 11310 - protein, 20 aa, Artificial Sequence
  Cyclic GFR-binding peptide
  MOD_RES (14)..(14): Xaa is C or S
IKRVQVPRLKTPAXTPKTVH

SEQ ID NO: 11311 - protein, 29 aa, Artificial Sequence
  Cyclic GFR-binding peptide
  MOD_RES (25)..(25): Xaa is C or S
FIPKKRVIEYYLVTLPELQVQTPRXQVNR

SEQ ID NO: 11312 - protein, 26 aa, Artificial Sequence
  Cyclic GFR-binding peptide
  MOD_RES (20)..(21): Xaa is C or S
KPKRGVMIQITINSLAQPVXXPAASA

SEQ ID NO: 11313 - protein, 16 aa, Artificial Sequence
  Cyclic GFR-binding peptide
  MOD_RES (14)..(15): Xaa is C or S
IKRVQVPRLQTPAXXP

SEQ ID NO: 11314 - protein, 24 aa, Artificial Sequence
  Cyclic GFR-binding peptide
  MOD_RES (18)..(19): Xaa is C or S
TKGIIKRIQVPRLDQSVXXPSASA

SEQ ID NO: 11315 - protein, 16 aa, Artificial Sequence
  Cyclic GFR-binding peptide
VKPKRGVVKAIKVSRL

SEQ ID NO: 11316 - protein, 17 aa, Artificial Sequence
  Cyclic GFR-binding peptide
  MOD_RES (16)..(16): Xaa is C or S
YYVVPLPELQVQTPRXQ

SEQ ID NO: 11317 - protein, 25 aa, Artificial Sequence
  Cyclic GFR-binding peptide
  MOD_RES (19)..(20): Xaa is C or S
NSSDDIKRVQVPRLQTPAXXPKPVT

SEQ ID NO: 11318 - protein, 17 aa, Artificial Sequence
  Cyclic GFR-binding peptide
IKPTKGIMIQITINSLD

SEQ ID NO: 11319 - protein, 15 aa, Artificial Sequence
  Cyclic GFR-binding peptide
  MOD_RES (14)..(14): Xaa is C or S
IKRVQVPRLKTPAXT

SEQ ID NO: 11320 - protein, 14 aa, Artificial Sequence
  Cyclic GFR-binding peptide
  MOD_RES (14)..(14): Xaa is C or S
VKAIKVSRLDQPVX

SEQ ID NO: 11321 - protein, 18 aa, Artificial Sequence
  Cyclic GFR-binding peptide
FIPKKRVIEYYVVPLPEL

SEQ ID NO: 11322 - protein, 27 aa, Artificial Sequence
  Cyclic GFR-binding peptide
  MOD_RES (21)..(22): Xaa is C or S
IVNSSDDVKAVKVSRLQTPAXXPKPVT

SEQ ID NO: 11323 - protein, 29 aa, Artificial Sequence
  Cyclic GFR-binding peptide
  MOD_RES (25)..(25): Xaa is C or S
LKPKKRVYEYYVVPLPEHHVRSPQXKVSS

SEQ ID NO: 11324 - protein, 13 aa, Artificial Sequence
  Cyclic GFR-binding peptide
MIQITINSLAQPV

SEQ ID NO: 11325 - protein, 21 aa, Artificial Sequence
  Cyclic GFR-binding peptide
FIPKKRVIEYYVVPLPELQVQ

SEQ ID NO: 11326 - protein, 14 aa, Artificial Sequence
  Cyclic GFR-binding peptide
  MOD_RES (14)..(14): Xaa is C or S
IKRVQVPRLQTPAX

SEQ ID NO: 11327 - protein, 20 aa, Artificial Sequence
  Cyclic GFR-binding peptide
LKPKKRVYEYYLVTLPEHHV

SEQ ID NO: 11328 - protein, 19 aa, Artificial Sequence
  Cyclic GFR-binding peptide
  MOD_RES (14)..(15): Xaa is C or S
IKRIQVPRLAQPVXXPAAS

SEQ ID NO: 11329 - protein, 15 aa, Artificial Sequence
  Cyclic GFR-binding peptide
VVKDYEDIKRMQVPR

SEQ ID NO: 11330 - protein, 23 aa, Artificial Sequence
  Cyclic GFR-binding peptide
  MOD_RES (17)..(18): Xaa is C or S
NEDMIQMTINSLETPVXXAKPIK

SEQ ID NO: 11331 - protein, 16 aa, Artificial Sequence
  Cyclic GFR-binding peptide
IKPTKGIVKAIKVSRL

SEQ ID NO: 11332 - protein, 26 aa, Artificial Sequence
  Cyclic GFR-binding peptide
  MOD_RES (20)..(21): Xaa is C or S
VNSSDDMIQVTINSLQTPAXXPKPVT

SEQ ID NO: 11333 - protein, 23 aa, Artificial Sequence
  Cyclic GFR-binding peptide
  MOD_RES (19)..(19): Xaa is C or S
VIEYYLVTLPELQVQTPRXQVNR

SEQ ID NO: 11334 - protein, 17 aa, Artificial Sequence
  Cyclic GFR-binding peptide
LKPKKRVYEYYVVPLPE

SEQ ID NO: 11335 - protein, 21 aa, Artificial Sequence
  Cyclic GFR-binding peptide
  MOD_RES (15)..(15): Xaa is C or S
RYYVMPLPEEETPVXELGEDN

SEQ ID NO: 11336 - protein, 21 aa, Artificial Sequence
  Cyclic GFR-binding peptide
  MOD_RES (15)..(16): Xaa is C or S
DIKRVQVPRLQTPAXXPKPVT

SEQ ID NO: 11337 - protein, 20 aa, Artificial Sequence
  Cyclic GFR-binding peptide
  MOD_RES (14)..(15): Xaa is C or S
IKRMQVPRLETPVXXAKPIS

SEQ ID NO: 11338 - protein, 19 aa, Artificial Sequence
  Cyclic GFR-binding peptide
LKPKKRVYEYYVVPLPEHH

SEQ ID NO: 11339 - protein, 15 aa, Artificial Sequence
  Cyclic GFR-binding peptide
VKPTRGVVKAIKVSR

SEQ ID NO: 11340 - protein, 22 aa, Artificial Sequence
  Cyclic GFR-binding peptide
  MOD_RES (16)..(16): Xaa is C or S
IRYYVMPLPEEETPVXELGEDN

SEQ ID NO: 11341 - protein, 22 aa, Artificial Sequence
  Cyclic GFR-binding peptide
  MOD_RES (16)..(17): Xaa is C or S
DDIKRVQVPRLQTPAXXPKPVT

SEQ ID NO: 11342 - protein, 15 aa, Artificial Sequence
  Cyclic GFR-binding peptide
IVNSSDDVKAVKVSR

SEQ ID NO: 11343 - protein, 25 aa, Artificial Sequence
  Cyclic GFR-binding peptide
  MOD_RES (19)..(20): Xaa is C or S
KENEDIKRMQVPRLETPVXXAKPIK

SEQ ID NO: 11344 - protein, 21 aa, Artificial Sequence
  Cyclic GFR-binding peptide
  MOD_RES (15)..(16): Xaa is C or S
DIKRMQVPRLETPVXXAKPIS

SEQ ID NO: 11345 - protein, 15 aa, Artificial Sequence
  Cyclic GFR-binding peptide
  MOD_RES (14)..(15): Xaa is C or S
IKRVQVPRLKTPAXX

SEQ ID NO: 11346 - protein, 18 aa, Artificial Sequence
  Cyclic GFR-binding peptide
VKPKRGVIKRIQVPRLAQ

SEQ ID NO: 11347 - protein, 19 aa, Artificial Sequence
  Cyclic GFR-binding peptide
  MOD_RES (14)..(14): Xaa is C or S
MIQVTINSLKTPAXTPKTV

SEQ ID NO: 11348 - protein, 23 aa, Artificial Sequence
  Cyclic GFR-binding peptide
  MOD_RES (17)..(17): Xaa is C or S
SDDMIQVTINSLKTPAXTPKTVH

SEQ ID NO: 11349 - protein, 19 aa, Artificial Sequence
  Cyclic GFR-binding peptide
VKPTRGVMIQITINSLDQP

SEQ ID NO: 11350 - protein, 25 aa, Artificial Sequence
  Cyclic GFR-binding peptide
  MOD_RES (19)..(20): Xaa is C or S
PTRGVIKRIQVPRLDQPVXXPSASA

SEQ ID NO: 11351 - protein, 24 aa, Artificial Sequence
  Cyclic GFR-binding peptide
  MOD_RES (18)..(19): Xaa is C or S
SSDDVKAVKVSRLQTPAXXPKPVT

SEQ ID NO: 11352 - protein, 22 aa, Artificial Sequence
  Cyclic GFR-binding peptide
  MOD_RES (16)..(17): Xaa is C or S
DDVKAVKVSRLQTPAXXPKPVT

SEQ ID NO: 11353 - protein, 18 aa, Artificial Sequence
  Cyclic GFR-binding peptide
  MOD_RES (14)..(15): Xaa is C or S
IKRMQVPRLETPVXXAKP

SEQ ID NO: 11354 - protein, 21 aa, Artificial Sequence
  Cyclic GFR-binding peptide
  MOD_RES (15)..(16): Xaa is C or S
DMIQVTINSLKTPAXXPKPVY

SEQ ID NO: 11355 - protein, 20 aa, Artificial Sequence
  Cyclic GFR-binding peptide
HQGQHPKIRYYLMTLPEEET

SEQ ID NO: 11356 - protein, 20 aa, Artificial Sequence
  Cyclic GFR-binding peptide
  MOD_RES (14)..(15): Xaa is C or S
MIQMTINSLETPVXXAKPIK

SEQ ID NO: 11357 - protein, 18 aa, Artificial Sequence
  Cyclic GFR-binding peptide
  MOD_RES (14)..(15): Xaa is C or S
IKRIQVPRLDQSVXXPSA

SEQ ID NO: 11358 - protein, 15 aa, Artificial Sequence
  Cyclic GFR-binding peptide
  MOD_RES (14)..(15): Xaa is C or S
MIQVTINSLKTPAXX

SEQ ID NO: 11359 - protein, 20 aa, Artificial Sequence
  Cyclic GFR-binding peptide
  MOD_RES (14)..(15): Xaa is C or S
IKRIQVPRLDQSVXXPSASA

SEQ ID NO: 11360 - protein, 13 aa, Artificial Sequence
  Cyclic GFR-binding peptide
MIQITINSLDQPV

SEQ ID NO: 11361 - protein, 20 aa, Artificial Sequence
  Cyclic GFR-binding peptide
  MOD_RES (16)..(16): Xaa is C or S
YYVVPLPELQVQTPRXQVNR

SEQ ID NO: 11362 - protein, 19 aa, Artificial Sequence
  Cyclic GFR-binding peptide
  MOD_RES (14)..(15): Xaa is C or S
IKRVQVPRLKTPAXXPKPV

SEQ ID NO: 11363 - protein, 22 aa, Artificial Sequence
  Cyclic GFR-binding peptide
  MOD_RES (16)..(17): Xaa is C or S
DDMIQVTINSLQTPAXXPKPVT

SEQ ID NO: 11364 - protein, 17 aa, Artificial Sequence
  Cyclic GFR-binding peptide
VKPKRGVVKAIKVSRLA

SEQ ID NO: 11365 - protein, 17 aa, Artificial Sequence
  Cyclic GFR-binding peptide
  MOD_RES (14)..(14): Xaa is C or S
VKAVKVSRLKTPAXTPK

SEQ ID NO: 11366 - protein, 23 aa, Artificial Sequence
  Cyclic GFR-binding peptide
  MOD_RES (17)..(17): Xaa is C or S
KIRYYVMPLPEEETPVXELGEDN

SEQ ID NO: 11367 - protein, 22 aa, Artificial Sequence
  Cyclic GFR-binding peptide
  MOD_RES (16)..(17): Xaa is C or S
GVMIQITINSLDQPVXXPSASA

SEQ ID NO: 11368 - protein, 21 aa, Artificial Sequence
  Cyclic GFR-binding peptide
  MOD_RES (15)..(16): Xaa is C or S
DVKAMKVSRLETPVXXAKPIS

SEQ ID NO: 11369 - protein, 20 aa, Artificial Sequence
  Cyclic GFR-binding peptide
  MOD_RES (14)..(15): Xaa is C or S
IKRMQVPRLETPVXXAKPIK

SEQ ID NO: 11370 - protein, 18 aa, Artificial Sequence
  Cyclic GFR-binding peptide
  MOD_RES (14)..(15): Xaa is C or S
MIQITINSLDQSVXXPSA

SEQ ID NO: 11371 - protein, 26 aa, Artificial Sequence
  Cyclic GFR-binding peptide
  MOD_RES (20)..(21): Xaa is C or S
VKENEDVKAMKVSRLETPVXXAKPIK

SEQ ID NO: 11372 - protein, 24 aa, Artificial Sequence
  Cyclic GFR-binding peptide
  MOD_RES (18)..(19): Xaa is C or S
SSDDMIQVTINSLQTPAXXPKPVT

SEQ ID NO: 11373 - protein, 26 aa, Artificial Sequence
  Cyclic GFR-binding peptide
  MOD_RES (22)..(22): Xaa is C or S
KKRVYEYYLVTLPEHHVRSPQXKVSS

SEQ ID NO: 11374 - protein, 17 aa, Artificial Sequence
  Cyclic GFR-binding peptide
  MOD_RES (14)..(15): Xaa is C or S
IKRMQVPRLETPVXXAK

SEQ ID NO: 11375 - protein, 15 aa, Artificial Sequence
  Cyclic GFR-binding peptide
  MOD_RES (14)..(14): Xaa is C or S
YYVMPLPEEETPVXE

SEQ ID NO: 11376 - protein, 21 aa, Artificial Sequence
  Cyclic GFR-binding peptide
  MOD_RES (15)..(16): Xaa is C or S
IIKRIQVPRLDQSVXXPSASA

SEQ ID NO: 11377 - protein, 21 aa, Artificial Sequence
  Cyclic GFR-binding peptide
  MOD_RES (15)..(16): Xaa is C or S
DVKAVKVSRLQTPAXXPKPVT

SEQ ID NO: 11378 - protein, 21 aa, Artificial Sequence
  Cyclic GFR-binding peptide
  MOD_RES (15)..(16): Xaa is C or S
VVKAIKVSRLDQPVXXPSASA

SEQ ID NO: 11379 - protein, 17 aa, Artificial Sequence
  Cyclic GFR-binding peptide
  MOD_RES (16)..(16): Xaa is C or S
YYLVTLPEHHVRSPQXK

SEQ ID NO: 11380 - protein, 25 aa, Artificial Sequence
  Cyclic GFR-binding peptide
  MOD_RES (21)..(21): Xaa is C or S
KRVYEYYLVTLPEHHVRSPQXKVSS

SEQ ID NO: 11381 - protein, 17 aa, Artificial Sequence
  Cyclic GFR-binding peptide
VVKENEDVKAMKVSRLE

SEQ ID NO: 11382 - protein, 17 aa, Artificial Sequence
  Cyclic GFR-binding peptide
FIPKKRVIEYYLVTLPE

SEQ ID NO: 11383 - protein, 15 aa, Artificial Sequence
  Cyclic GFR-binding peptide
  MOD_RES (14)..(15): Xaa is C or S
IKRVQVPRLQTPAXX

SEQ ID NO: 11384 - protein, 19 aa, Artificial Sequence
  Cyclic GFR-binding peptide
VKPKRGVVKAIKVSRLAQP

SEQ ID NO: 11385 - protein, 13 aa, Artificial Sequence
  Cyclic GFR-binding peptide
VKAMKVSRLETPV

SEQ ID NO: 11386 - protein, 27 aa, Artificial Sequence
  Cyclic GFR-binding peptide
  MOD_RES (21)..(22): Xaa is C or S
VVKENEDMIQMTINSLETPVXXAKPIK

SEQ ID NO: 11387 - protein, 22 aa, Artificial Sequence
  Cyclic GFR-binding peptide
  MOD_RES (16)..(17): Xaa is C or S
GIIKRIQVPRLDQSVXXPSASA

SEQ ID NO: 11388 - protein, 27 aa, Artificial Sequence
  Cyclic GFR-binding peptide
  MOD_RES (23)..(23): Xaa is C or S
PKKRVYEYYVVPLPEHHVRSPQXKVSS

SEQ ID NO: 11389 - protein, 19 aa, Artificial Sequence
  Cyclic GFR-binding peptide
  MOD_RES (16)..(16): Xaa is C or S
YYLVTLPEHHVRSPQXKVS

SEQ ID NO: 11390 - protein, 19 aa, Artificial Sequence
  Cyclic GFR-binding peptide
VVKENEDMIQMTINSLETP

SEQ ID NO: 11391 - protein, 17 aa, Artificial Sequence
  Cyclic GFR-binding peptide
VKPTRGVMIQITINSLD

SEQ ID NO: 11392 - protein, 16 aa, Artificial Sequence
  Cyclic GFR-binding peptide
  MOD_RES (14)..(15): Xaa is C or S
MIQVTINSLQTPAXXP

SEQ ID NO: 11393 - protein, 20 aa, Artificial Sequence
  Cyclic GFR-binding peptide
  MOD_RES (14)..(14): Xaa is C or S
MIQVTINSLKTPAXTPKTVH

SEQ ID NO: 11394 - protein, 14 aa, Artificial Sequence
  Cyclic GFR-binding peptide
  MOD_RES (14)..(14): Xaa is C or S
IKRVQVPRLKTPAX

SEQ ID NO: 11395 - protein, 17 aa, Artificial Sequence
  Cyclic GFR-binding peptide
IVNSSDDMIQVTINSLQ

SEQ ID NO: 11396 - protein, 17 aa, Artificial Sequence
  Cyclic GFR-binding peptide
HQGQHPKIRYYVMPLPE

SEQ ID NO: 11397 - protein, 15 aa, Artificial Sequence
  Cyclic GFR-binding peptide
IKPTKGIVKAIKVSR

SEQ ID NO: 11398 - protein, 26 aa, Artificial Sequence
  Cyclic GFR-binding peptide
  MOD_RES (20)..(20): Xaa is C or S
QHPKIRYYVMPLPEEETPVXELGEDN

SEQ ID NO: 11399 - protein, 15 aa, Artificial Sequence
  Cyclic GFR-binding peptide
  MOD_RES (14)..(14): Xaa is C or S
VKAVKVSRLKTPAXT

SEQ ID NO: 11400 - protein, 26 aa, Artificial Sequence
  Cyclic GFR-binding peptide
  MOD_RES (20)..(20): Xaa is C or S
VNSSDDMIQVTINSLKTPAXTPKTVH

SEQ ID NO: 11401 - protein, 22 aa, Artificial Sequence
  Cyclic GFR-binding peptide
  MOD_RES (16)..(17): Xaa is C or S
GIVKAIKVSRLDQSVXXPSASA

SEQ ID NO: 11402 - protein, 26 aa, Artificial Sequence
  Cyclic GFR-binding peptide
  MOD_RES (20)..(21): Xaa is C or S
VNSSDDMIQVTINSLKTPAXXPKPVY

SEQ ID NO: 11403 - protein, 24 aa, Artificial Sequence
  Cyclic GFR-binding peptide
  MOD_RES (18)..(19): Xaa is C or S
DYEDVKAMKVSRLETPVXXAKPIS

SEQ ID NO: 11404 - protein, 19 aa, Artificial Sequence
  Cyclic GFR-binding peptide
  MOD_RES (14)..(14): Xaa is C or S
IKRVQVPRLKTPAXTPKTV

SEQ ID NO: 11405 - protein, 20 aa, Artificial Sequence
  Cyclic GFR-binding peptide
  MOD_RES (14)..(15): Xaa is C or S
MIQITINSLAQPVXXPAASA

SEQ ID NO: 11406 - protein, 16 aa, Artificial Sequence
  Cyclic GFR-binding peptide
  MOD_RES (14)..(15): Xaa is C or S
VKAIKVSRLDQSVXXP

SEQ ID NO: 11407 - protein, 23 aa, Artificial Sequence
  Cyclic GFR-binding peptide
  MOD_RES (17)..(18): Xaa is C or S
RGVVKAIKVSRLAQPVXXPAASA

SEQ ID NO: 11408 - protein, 18 aa, Artificial Sequence
  Cyclic GFR-binding peptide
IKPTKGIIKRIQVPRLDQ

SEQ ID NO: 11409 - protein, 17 aa, Artificial Sequence
  Cyclic GFR-binding peptide
IVNSSDDMIQVTINSLK

SEQ ID NO: 11410 - protein, 22 aa, Artificial Sequence
  Cyclic GFR-binding peptide
  MOD_RES (16)..(16): Xaa is C or S
IRYYLMTLPEEETPVXELGEDN

SEQ ID NO: 11411 - protein, 27 aa, Artificial Sequence
  Cyclic GFR-binding peptide
  MOD_RES (21)..(21): Xaa is C or S
GQHPKIRYYLMTLPEEETPVXELGEDN

SEQ ID NO: 11412 - protein, 24 aa, Artificial Sequence
  Cyclic GFR-binding peptide
  MOD_RES (18)..(19): Xaa is C or S
KRGVIKRIQVPRLAQPVXXPAASA

SEQ ID NO: 11413 - protein, 20 aa, Artificial Sequence
  Cyclic GFR-binding peptide
  MOD_RES (14)..(14): Xaa is C or S
VKAVKVSRLKTPAXTPKTVH

SEQ ID NO: 11414 - protein, 13 aa, Artificial Sequence
  Cyclic GFR-binding peptide
VKAVKVSRLKTPA

SEQ ID NO: 11415 - protein, 16 aa, Artificial Sequence
  Cyclic GFR-binding peptide
VVKENEDIKRMQVPRL

SEQ ID NO: 11416 - protein, 25 aa, Artificial Sequence
  Cyclic GFR-binding peptide
  MOD_RES (19)..(20): Xaa is C or S
PKRGVVKAIKVSRLAQPVXXPAASA

SEQ ID NO: 11417 - protein, 26 aa, Artificial Sequence
  Cyclic GFR-binding peptide
  MOD_RES (20)..(21): Xaa is C or S
KPTRGVVKAIKVSRLDQPVXXPSASA

SEQ ID NO: 11418 - protein, 15 aa, Artificial Sequence
  Cyclic GFR-binding peptide
YYLVTLPELQVQTPR

SEQ ID NO: 11419 - protein, 25 aa, Artificial Sequence
  Cyclic GFR-binding peptide
  MOD_RES (19)..(20): Xaa is C or S
PKRGVMIQITINSLAQPVXXPAASA

SEQ ID NO: 11420 - protein, 18 aa, Artificial Sequence
  Cyclic GFR-binding peptide
  MOD_RES (14)..(15): Xaa is C or S
MIQVTINSLQTPAXXPKP

SEQ ID NO: 11421 - protein, 25 aa, Artificial Sequence
  Cyclic GFR-binding peptide
  MOD_RES (19)..(20): Xaa is C or S
NSSDDIKRVQVPRLKTPAXXPKPVY

SEQ ID NO: 11422 - protein, 22 aa, Artificial Sequence
  Cyclic GFR-binding peptide
  MOD_RES (18)..(18): Xaa is C or S
IEYYLVTLPELQVQTPRXQVNR

SEQ ID NO: 11423 - protein, 20 aa, Artificial Sequence
  Cyclic GFR-binding peptide
FIPKKRVIEYYLVTLPELQV

SEQ ID NO: 11424 - protein, 25 aa, Artificial Sequence
  Cyclic GFR-binding peptide
  MOD_RES (19)..(20): Xaa is C or S
KENEDMIQMTINSLETPVXXAKPIK

SEQ ID NO: 11425 - protein, 25 aa, Artificial Sequence
  Cyclic GFR-binding peptide
  MOD_RES (21)..(21): Xaa is C or S
KRVIEYYLVTLPELQVQTPRXQVNR

SEQ ID NO: 11426 - protein, 27 aa, Artificial Sequence
  Cyclic GFR-binding peptide
  MOD_RES (21)..(22): Xaa is C or S
VKPKRGVVKAIKVSRLAQPVXXPAASA

SEQ ID NO: 11427 - protein, 24 aa, Artificial Sequence
  Cyclic GFR-binding peptide
  MOD_RES (18)..(19): Xaa is C or S
SSDDIKRVQVPRLKTPAXXPKPVY

SEQ ID NO: 11428 - protein, 17 aa, Artificial Sequence
  Cyclic GFR-binding peptide
  MOD_RES (14)..(15): Xaa is C or S
IKRVQVPRLKTPAXXPK

SEQ ID NO: 11429 - protein, 17 aa, Artificial Sequence
  Cyclic GFR-binding peptide
  MOD_RES (16)..(16): Xaa is C or S
YYVVPLPEHHVRSPQXK

SEQ ID NO: 11430 - protein, 20 aa, Artificial Sequence
  Cyclic GFR-binding peptide
  MOD_RES (14)..(15): Xaa is C or S
IKRIQVPRLDQPVXXPSASA

SEQ ID NO: 11431 - protein, 15 aa, Artificial Sequence
  Cyclic GFR-binding peptide
VKPKRGVVKAIKVSR

SEQ ID NO: 11432 - protein, 16 aa, Artificial Sequence
  Cyclic GFR-binding peptide
  MOD_RES (14)..(15): Xaa is C or S
VKAIKVSRLAQPVXXP

SEQ ID NO: 11433 - protein, 17 aa, Artificial Sequence
  Cyclic GFR-binding peptide
  MOD_RES (14)..(15): Xaa is C or S
MIQMTINSLETPVXXAK

SEQ ID NO: 11434 - protein, 20 aa, Artificial Sequence
  Cyclic GFR-binding peptide
  MOD_RES (14)..(15): Xaa is C or S
IKRIQVPRLAQPVXXPAASA

SEQ ID NO: 11435 - protein, 23 aa, Artificial Sequence
  Cyclic GFR-binding peptide
  MOD_RES (17)..(18): Xaa is C or S
RGVMIQITINSLAQPVXXPAASA

SEQ ID NO: 11436 - protein, 15 aa, Artificial Sequence
  Cyclic GFR-binding peptide
  MOD_RES (14)..(15): Xaa is C or S
VKAVKVSRLKTPAXX

SEQ ID NO: 11437 - protein, 18 aa, Artificial Sequence
  Cyclic GFR-binding peptide
VVKDYEDIKRMQVPRLET

SEQ ID NO: 11438 - protein, 19 aa, Artificial Sequence
  Cyclic GFR-binding peptide
HQGQHPKIRYYLMTLPEEE

SEQ ID NO: 11439 - protein, 22 aa, Artificial Sequence
  Cyclic GFR-binding peptide
  MOD_RES (16)..(17): Xaa is C or S
EDVKAMKVSRLETPVXXAKPIS

SEQ ID NO: 11440 - protein, 22 aa, Artificial Sequence
  Cyclic GFR-binding peptide
  MOD_RES (16)..(16): Xaa is C or S
DDVKAVKVSRLKTPAXTPKTVH

SEQ ID NO: 11441 - protein, 16 aa, Artificial Sequence
  Cyclic GFR-binding peptide
IVNSSDDMIQVTINSL

SEQ ID NO: 11442 - protein, 27 aa, Artificial Sequence
  Cyclic GFR-binding peptide
  MOD_RES (21)..(22): Xaa is C or S
VKPKRGVMIQITINSLAQPVXXPAASA

SEQ ID NO: 11443 - protein, 27 aa, Artificial Sequence
  Cyclic GFR-binding peptide
  MOD_RES (21)..(22): Xaa is C or S
IKPTKGIIKRIQVPRLDQSVXXPSASA

SEQ ID NO: 11444 - protein, 19 aa, Artificial Sequence
  Cyclic GFR-binding peptide
VVKDYEDIKRMQVPRLETP

SEQ ID NO: 11445 - protein, 21 aa, Artificial Sequence
  Cyclic GFR-binding peptide
  MOD_RES (15)..(16): Xaa is C or S
VIKRIQVPRLDQPVXXPSASA

SEQ ID NO: 11446 - protein, 29 aa, Artificial Sequence
  Cyclic GFR-binding peptide
  MOD_RES (25)..(25): Xaa is C or S
LKPKKRVYEYYLVTLPEHHVRSPQXKVSS

SEQ ID NO: 11447 - protein, 20 aa, Artificial Sequence
  Cyclic GFR-binding peptide
  MOD_RES (14)..(14): Xaa is C or S
YYLMTLPEEETPVXELGEDN

SEQ ID NO: 11448 - protein, 28 aa, Artificial Sequence
  Cyclic GFR-binding peptide
  MOD_RES (22)..(22): Xaa is C or S
QGQHPKIRYYLMTLPEEETPVXELGEDN

SEQ ID NO: 11449 - protein, 26 aa, Artificial Sequence
  Cyclic GFR-binding peptide
  MOD_RES (20)..(21): Xaa is C or S
KPTKGIVKAIKVSRLDQSVXXPSASA

SEQ ID NO: 11450 - protein, 14 aa, Artificial Sequence
  Cyclic GFR-binding peptide
  MOD_RES (14)..(14): Xaa is C or S
MIQVTINSLKTPAX

SEQ ID NO: 11451 - protein, 16 aa, Artificial Sequence
  Cyclic GFR-binding peptide
IVNSSDDVKAVKVSRL

SEQ ID NO: 11452 - protein, 16 aa, Artificial Sequence
  Cyclic GFR-binding peptide
  MOD_RES (16)..(16): Xaa is C or S
YYVVPLPELQVQTPRX

SEQ ID NO: 11453 - protein, 17 aa, Artificial Sequence
  Cyclic GFR-binding peptide
IVNSSDDVKAVKVSRLK

SEQ ID NO: 11454 - protein, 17 aa, Artificial Sequence
  Cyclic GFR-binding peptide
IVNSSDDVKAVKVSRLQ

SEQ ID NO: 11455 - protein, 20 aa, Artificial Sequence
  Cyclic GFR-binding peptide
  MOD_RES (14)..(15): Xaa is C or S
VKAMKVSRLETPVXXAKPIK

SEQ ID NO: 11456 - protein, 18 aa, Artificial Sequence
  Cyclic GFR-binding peptide
VVKENEDVKAMKVSRLET

SEQ ID NO: 11457 - protein, 21 aa, Artificial Sequence
  Cyclic GFR-binding peptide
LKPKKRVYEYYVVPLPEHHVR

SEQ ID NO: 11458 - protein, 19 aa, Artificial Sequence
  Cyclic GFR-binding peptide
  MOD_RES (14)..(14): Xaa is C or S
YYLMTLPEEETPVXELGED

SEQ ID NO: 11459 - protein, 16 aa, Artificial Sequence
  Cyclic GFR-binding peptide
  MOD_RES (14)..(15): Xaa is C or S
VKAIKVSRLDQPVXXP

SEQ ID NO: 11460 - protein, 14 aa, Artificial Sequence
  Cyclic GFR-binding peptide
YYVVPLPELQVQTP

SEQ ID NO: 11461 - protein, 25 aa, Artificial Sequence
  Cyclic GFR-binding peptide
  MOD_RES (19)..(20): Xaa is C or S
NSSDDVKAVKVSRLKTPAXXPKPVY

SEQ ID NO: 11462 - protein, 18 aa, Artificial Sequence
  Cyclic GFR-binding peptide
  MOD_RES (16)..(16): Xaa is C or S
YYVVPLPEHHVRSPQXKV

SEQ ID NO: 11463 - protein, 21 aa, Artificial Sequence
  Cyclic GFR-binding peptide
  MOD_RES (17)..(17): Xaa is C or S
EYYVVPLPELQVQTPRXQVNR

SEQ ID NO: 11464 - protein, 16 aa, Artificial Sequence
  Cyclic GFR-binding peptide
  MOD_RES (16)..(16): Xaa is C or S
YYVVPLPEHHVRSPQX

SEQ ID NO: 11465 - protein, 19 aa, Artificial Sequence
  Cyclic GFR-binding peptide
  MOD_RES (14)..(15): Xaa is C or S
MIQITINSLDQSVXXPSAS

SEQ ID NO: 11466 - protein, 19 aa, Artificial Sequence
  Cyclic GFR-binding peptide
IKPTKGIMIQITINSLDQS

SEQ ID NO: 11467 - protein, 27 aa, Artificial Sequence
  Cyclic GFR-binding peptide
  MOD_RES (21)..(22): Xaa is C or S
VVKDYEDMIQMTINSLETPVXXAKPIS

SEQ ID NO: 11468 - protein, 18 aa, Artificial Sequence
  Cyclic GFR-binding peptide
VVKENEDMIQMTINSLET

SEQ ID NO: 11469 - protein, 25 aa, Artificial Sequence
  Cyclic GFR-binding peptide
  MOD_RES (19)..(20): Xaa is C or S
PKRGVIKRIQVPRLAQPVXXPAASA

SEQ ID NO: 11470 - protein, 25 aa, Artificial Sequence
  Cyclic GFR-binding peptide
  MOD_RES (19)..(20): Xaa is C or S
NSSDDMIQVTINSLKTPAXXPKPVY

SEQ ID NO: 11471 - protein, 15 aa, Artificial Sequence
  Cyclic GFR-binding peptide
VKPKRGVMIQITINS

SEQ ID NO: 11472 - protein, 26 aa, Artificial Sequence
  Cyclic GFR-binding peptide
  MOD_RES (22)..(22): Xaa is C or S
KKRVYEYYVVPLPEHHVRSPQXKVSS

SEQ ID NO: 11473 - protein, 18 aa, Artificial Sequence
  Cyclic GFR-binding peptide
  MOD_RES (14)..(14): Xaa is C or S
YYLMTLPEEETPVXELGE

SEQ ID NO: 11474 - protein, 18 aa, Artificial Sequence
  Cyclic GFR-binding peptide
  MOD_RES (14)..(15): Xaa is C or S
VKAVKVSRLKTPAXXPKP

SEQ ID NO: 11475 - protein, 15 aa, Artificial Sequence
  Cyclic GFR-binding peptide
YYLVTLPEHHVRSPQ

SEQ ID NO: 11476 - protein, 22 aa, Artificial Sequence
  Cyclic GFR-binding peptide
  MOD_RES (18)..(18): Xaa is C or S
IEYYVVPLPELQVQTPRXQVNR

SEQ ID NO: 11477 - protein, 17 aa, Artificial Sequence
  Cyclic GFR-binding peptide
VVKENEDIKRMQVPRLE

SEQ ID NO: 11478 - protein, 24 aa, Artificial Sequence
  Cyclic GFR-binding peptide
  MOD_RES (18)..(19): Xaa is C or S
DYEDMIQMTINSLETPVXXAKPIS

SEQ ID NO: 11479 - protein, 24 aa, Artificial Sequence
  Cyclic GFR-binding peptide
  MOD_RES (18)..(19): Xaa is C or S
TKGIMIQITINSLDQSVXXPSASA

SEQ ID NO: 11480 - protein, 29 aa, Artificial Sequence
  Cyclic GFR-binding peptide
  MOD_RES (23)..(23): Xaa is C or S
HQGQHPKIRYYLMTLPEEETPVXELGEDN

SEQ ID NO: 11481 - protein, 23 aa, Artificial Sequence
  Cyclic GFR-binding peptide
  MOD_RES (17)..(18): Xaa is C or S
RGVMIQITINSLDQPVXXPSASA

SEQ ID NO: 11482 - protein, 20 aa, Artificial Sequence
  Cyclic GFR-binding peptide
  MOD_RES (14)..(15): Xaa is C or S
MIQVTINSLQTPAXXPKPVT

SEQ ID NO: 11483 - protein, 24 aa, Artificial Sequence
  Cyclic GFR-binding peptide
  MOD_RES (18)..(19): Xaa is C or S
SSDDIKRVQVPRLQTPAXXPKPVT

SEQ ID NO: 11484 - protein, 19 aa, Artificial Sequence
  Cyclic GFR-binding peptide
IKPTKGIVKAIKVSRLDQS

SEQ ID NO: 11485 - protein, 26 aa, Artificial Sequence
  Cyclic GFR-binding peptide
  MOD_RES (20)..(21): Xaa is C or S
KPKRGVIKRIQVPRLAQPVXXPAASA

SEQ ID NO: 11486 - protein, 20 aa, Artificial Sequence
  Cyclic GFR-binding peptide
  MOD_RES (14)..(14): Xaa is C or S
YYVMPLPEEETPVXELGEDN

SEQ ID NO: 11487 - protein, 23 aa, Artificial Sequence
  Cyclic GFR-binding peptide
  MOD_RES (17)..(18): Xaa is C or S
KGIMIQITINSLDQSVXXPSASA

SEQ ID NO: 11488 - protein, 18 aa, Artificial Sequence
  Cyclic GFR-binding peptide
  MOD_RES (14)..(14): Xaa is C or S
YYVMPLPEEETPVXELGE

SEQ ID NO: 11489 - protein, 14 aa, Artificial Sequence
  Cyclic GFR-binding peptide
YYLVTLPEHHVRSP

SEQ ID NO: 11490 - protein, 15 aa, Artificial Sequence
  Cyclic GFR-binding peptide
YYVVPLPEHHVRSPQ

SEQ ID NO: 11491 - protein, 16 aa, Artificial Sequence
  Cyclic GFR-binding peptide
  MOD_RES (14)..(15): Xaa is C or S
VKAVKVSRLQTPAXXP

SEQ ID NO: 11492 - protein, 25 aa, Artificial Sequence
  Cyclic GFR-binding peptide
  MOD_RES (21)..(21): Xaa is C or S
KRVIEYYVVPLPELQVQTPRXQVNR

SEQ ID NO: 11493 - protein, 23 aa, Artificial Sequence
  Cyclic GFR-binding peptide
  MOD_RES (17)..(18): Xaa is C or S
SDDVKAVKVSRLQTPAXXPKPVT

SEQ ID NO: 11494 - protein, 24 aa, Artificial Sequence
  Cyclic GFR-binding peptide
  MOD_RES (18)..(19): Xaa is C or S
TRGVIKRIQVPRLDQPVXXPSASA

SEQ ID NO: 11495 - protein, 18 aa, Artificial Sequence
  Cyclic GFR-binding peptide
  MOD_RES (16)..(16): Xaa is C or S
YYLVTLPEHHVRSPQXKV

SEQ ID NO: 11496 - protein, 20 aa, Artificial Sequence
  Cyclic GFR-binding peptide
  MOD_RES (16)..(16): Xaa is C or S
YYVVPLPEHHVRSPQXKVSS

SEQ ID NO: 11497 - protein, 27 aa, Artificial Sequence
  Cyclic GFR-binding peptide
  MOD_RES (23)..(23): Xaa is C or S
PKKRVYEYYLVTLPEHHVRSPQXKVSS

SEQ ID NO: 11498 - protein, 16 aa, Artificial Sequence
  Cyclic GFR-binding peptide
  MOD_RES (14)..(15): Xaa is C or S
IKRIQVPRLDQPVXXP

SEQ ID NO: 11499 - protein, 28 aa, Artificial Sequence
  Cyclic GFR-binding peptide
  MOD_RES (24)..(24): Xaa is C or S
IPKKRVIEYYLVTLPELQVQTPRXQVNR

SEQ ID NO: 11500 - protein, 20 aa, Artificial Sequence
  Cyclic GFR-binding peptide
FIPKKRVIEYYVVPLPELQV

SEQ ID NO: 11501 - protein, 21 aa, Artificial Sequence
  Cyclic GFR-binding peptide
  MOD_RES (15)..(15): Xaa is C or S
DVKAVKVSRLKTPAXTPKTVH

SEQ ID NO: 11502 - protein, 20 aa, Artificial Sequence
  Cyclic GFR-binding peptide
  MOD_RES (14)..(15): Xaa is C or S
MIQITINSLDQPVXXPSASA

SEQ ID NO: 11503 - protein, 23 aa, Artificial Sequence
  Cyclic GFR-binding peptide
  MOD_RES (17)..(18): Xaa is C or S
YEDIKRMQVPRLETPVXXAKPIS

SEQ ID NO: 11504 - protein, 15 aa, Artificial Sequence
  Cyclic GFR-binding peptide
IKPTKGIMIQITINS

SEQ ID NO: 11505 - protein, 19 aa, Artificial Sequence
  Cyclic GFR-binding peptide
  MOD_RES (14)..(14): Xaa is C or S
YYVMPLPEEETPVXELGED

SEQ ID NO: 11506 - protein, 24 aa, Artificial Sequence
  Cyclic GFR-binding peptide
  MOD_RES (18)..(19): Xaa is C or S
TKGIVKAIKVSRLDQSVXXPSASA

SEQ ID NO: 11507 - protein, 21 aa, Artificial Sequence
  Cyclic GFR-binding peptide
  MOD_RES (15)..(15): Xaa is C or S
RYYLMTLPEEETPVXELGEDN

SEQ ID NO: 11508 - protein, 18 aa, Artificial Sequence
  Cyclic GFR-binding peptide
  MOD_RES (14)..(15): Xaa is C or S
VKAIKVSRLAQPVXXPAA

SEQ ID NO: 11509 - protein, 13 aa, Artificial Sequence
  Cyclic GFR-binding peptide
YYVVPLPEHHVRS

SEQ ID NO: 11510 - protein, 19 aa, Artificial Sequence
  Cyclic GFR-binding peptide
VKPKRGVIKRIQVPRLAQP

SEQ ID NO: 11511 - protein, 16 aa, Artificial Sequence
  Cyclic GFR-binding peptide
  MOD_RES (16)..(16): Xaa is C or S
YYLVTLPEHHVRSPQX

SEQ ID NO: 11512 - protein, 19 aa, Artificial Sequence
  Cyclic GFR-binding peptide
FIPKKRVIEYYVVPLPELQ

SEQ ID NO: 11513 - protein, 27 aa, Artificial Sequence
  Cyclic GFR-binding peptide
  MOD_RES (21)..(22): Xaa is C or S
VVKENEDVKAMKVSRLETPVXXAKPIK

SEQ ID NO: 11514 - protein, 27 aa, Artificial Sequence
  Cyclic GFR-binding peptide
  MOD_RES (21)..(22): Xaa is C or S
IVNSSDDMIQVTINSLQTPAXXPKPVT

SEQ ID NO: 11515 - protein, 16 aa, Artificial Sequence
  Cyclic GFR-binding peptide
  MOD_RES (14)..(15): Xaa is C or S
IKRIQVPRLAQPVXXP

SEQ ID NO: 11516 - protein, 27 aa, Artificial Sequence
  Cyclic GFR-binding peptide
  MOD_RES (21)..(22): Xaa is C or S
VKPTRGVVKAIKVSRLDQPVXXPSASA

SEQ ID NO: 11517 - protein, 25 aa, Artificial Sequence
  Cyclic GFR-binding peptide
  MOD_RES (19)..(20): Xaa is C or S
PTRGVMIQITINSLDQPVXXPSASA

SEQ ID NO: 11518 - protein, 17 aa, Artificial Sequence
  Cyclic GFR-binding peptide
VVKDYEDMIQMTINSLE

SEQ ID NO: 11519 - protein, 20 aa, Artificial Sequence
  Cyclic GFR-binding peptide
  MOD_RES (14)..(15): Xaa is C or S
VKAIKVSRLDQPVXXPSASA

SEQ ID NO: 11520 - protein, 19 aa, Artificial Sequence
  Cyclic GFR-binding peptide
  MOD_RES (14)..(15): Xaa is C or S
IKRIQVPRLDQSVXXPSAS

SEQ ID NO: 11521 - protein, 23 aa, Artificial Sequence
  Cyclic GFR-binding peptide
  MOD_RES (19)..(19): Xaa is C or S
VIEYYVVPLPELQVQTPRXQVNR

SEQ ID NO: 11522 - protein, 19 aa, Artificial Sequence
  Cyclic GFR-binding peptide
VVKENEDVKAMKVSRLETP

SEQ ID NO: 11523 - protein, 25 aa, Artificial Sequence
  Cyclic GFR-binding peptide
  MOD_RES (19)..(20): Xaa is C or S
NSSDDMIQVTINSLQTPAXXPKPVT

SEQ ID NO: 11524 - protein, 24 aa, Artificial Sequence
  Cyclic GFR-binding peptide
  MOD_RES (18)..(19): Xaa is C or S
DYEDIKRMQVPRLETPVXXAKPIS

SEQ ID NO: 11525 - protein, 19 aa, Artificial Sequence
  Cyclic GFR-binding peptide
VKPKRGVMIQITINSLAQP

SEQ ID NO: 11526 - protein, 23 aa, Artificial Sequence
  Cyclic GFR-binding peptide
  MOD_RES (17)..(18): Xaa is C or S
KGIVKAIKVSRLDQSVXXPSASA

SEQ ID NO: 11527 - protein, 13 aa, Artificial Sequence
  Cyclic GFR-binding peptide
IKRVQVPRLQTPA

SEQ ID NO: 11528 - protein, 13 aa, Artificial Sequence
  Cyclic GFR-binding peptide
MIQVTINSLKTPA

SEQ ID NO: 11529 - protein, 27 aa, Artificial Sequence
  Cyclic GFR-binding peptide
  MOD_RES (21)..(22): Xaa is C or S
VVKENEDIKRMQVPRLETPVXXAKPIK

SEQ ID NO: 11530 - protein, 15 aa, Artificial Sequence
  Cyclic GFR-binding peptide
  MOD_RES (14)..(15): Xaa is C or S
IKRIQVPRLAQPVXX

SEQ ID NO: 11531 - protein, 14 aa, Artificial Sequence
  Cyclic GFR-binding peptide
  MOD_RES (14)..(14): Xaa is C or S
VKAMKVSRLETPVX

SEQ ID NO: 11532 - protein, 25 aa, Artificial Sequence
  Cyclic GFR-binding peptide
  MOD_RES (19)..(20): Xaa is C or S
NSSDDVKAVKVSRLQTPAXXPKPVT

SEQ ID NO: 11533 - protein, 14 aa, Artificial Sequence
  Cyclic GFR-binding peptide
  MOD_RES (14)..(14): Xaa is C or S
MIQITINSLAQPVX

SEQ ID NO: 11534 - protein, 17 aa, Artificial Sequence
  Cyclic GFR-binding peptide
IKPTKGIVKAIKVSRLD

SEQ ID NO: 11535 - protein, 24 aa, Artificial Sequence
  Cyclic GFR-binding peptide
  MOD_RES (18)..(19): Xaa is C or S
KRGVVKAIKVSRLAQPVXXPAASA

SEQ ID NO: 11536 - protein, 16 aa, Artificial Sequence
  Cyclic GFR-binding peptide
VKPKRGVMIQITINSL

SEQ ID NO: 11537 - protein, 16 aa, Artificial Sequence
  Cyclic GFR-binding peptide
  MOD_RES (14)..(15): Xaa is C or S
MIQITINSLDQSVXXP

SEQ ID NO: 11538 - protein, 18 aa, Artificial Sequence
  Cyclic GFR-binding peptide
  MOD_RES (14)..(15): Xaa is C or S
IKRIQVPRLAQPVXXPAA

SEQ ID NO: 11539 - protein, 26 aa, Artificial Sequence
  Cyclic GFR-binding peptide
  MOD_RES (20)..(21): Xaa is C or S
VKDYEDIKRMQVPRLETPVXXAKPIS

SEQ ID NO: 11540 - protein, 16 aa, Artificial Sequence
  Cyclic GFR-binding peptide
  MOD_RES (14)..(15): Xaa is C or S
MIQMTINSLETPVXXA

SEQ ID NO: 11541 - protein, 21 aa, Artificial Sequence
  Cyclic GFR-binding peptide
  MOD_RES (15)..(16): Xaa is C or S
DVKAVKVSRLKTPAXXPKPVY

SEQ ID NO: 11542 - protein, 23 aa, Artificial Sequence
  Cyclic GFR-binding peptide
  MOD_RES (17)..(18): Xaa is C or S
KGIIKRIQVPRLDQSVXXPSASA

SEQ ID NO: 11543 - protein, 17 aa, Artificial Sequence
  Cyclic GFR-binding peptide
VKPKRGVIKRIQVPRLA

SEQ ID NO: 11544 - protein, 19 aa, Artificial Sequence
  Cyclic GFR-binding peptide
IVNSSDDVKAVKVSRLQTP

SEQ ID NO: 11545 - protein, 17 aa, Artificial Sequence
  Cyclic GFR-binding peptide
  MOD_RES (14)..(15): Xaa is C or S
VKAIKVSRLDQPVXXPS

SEQ ID NO: 11546 - protein, 24 aa, Artificial Sequence
  Cyclic GFR-binding peptide
  MOD_RES (18)..(19): Xaa is C or S
ENEDIKRMQVPRLETPVXXAKPIK

SEQ ID NO: 11547 - protein, 17 aa, Artificial Sequence
  Cyclic GFR-binding peptide
  MOD_RES (14)..(15): Xaa is C or S
VKAMKVSRLETPVXXAK

SEQ ID NO: 11548 - protein, 16 aa, Artificial Sequence
  Cyclic GFR-binding peptide
VKPTRGVMIQITINSL

SEQ ID NO: 11549 - protein, 19 aa, Artificial Sequence
  Cyclic GFR-binding peptide
  MOD_RES (14)..(14): Xaa is C or S
VKAVKVSRLKTPAXTPKTV

SEQ ID NO: 11550 - protein, 18 aa, Artificial Sequence
  Cyclic GFR-binding peptide
  MOD_RES (14)..(15): Xaa is C or S
MIQITINSLAQPVXXPAA

SEQ ID NO: 11551 - protein, 18 aa, Artificial Sequence
  Cyclic GFR-binding peptide
IVNSSDDVKAVKVSRLKT

SEQ ID NO: 11552 - protein, 18 aa, Artificial Sequence
  Cyclic GFR-binding peptide
IVNSSDDVKAVKVSRLQT

SEQ ID NO: 11553 - protein, 26 aa, Artificial Sequence
  Cyclic GFR-binding peptide
  MOD_RES (20)..(21): Xaa is C or S
VKENEDIKRMQVPRLETPVXXAKPIK

SEQ ID NO: 11554 - protein, 26 aa, Artificial Sequence
  Cyclic GFR-binding peptide
  MOD_RES (20)..(21): Xaa is C or S
VKDYEDMIQMTINSLETPVXXAKPIS

SEQ ID NO: 11555 - protein, 23 aa, Artificial Sequence
  Cyclic GFR-binding peptide
  MOD_RES (17)..(18): Xaa is C or S
NEDVKAMKVSRLETPVXXAKPIK

SEQ ID NO: 11556 - protein, 19 aa, Artificial Sequence
  Cyclic GFR-binding peptide
IVNSSDDVKAVKVSRLKTP

SEQ ID NO: 11557 - protein, 18 aa, Artificial Sequence
  Cyclic GFR-binding peptide
  MOD_RES (14)..(15): Xaa is C or S
VKAIKVSRLDQSVXXPSA

SEQ ID NO: 11558 - protein, 18 aa, Artificial Sequence
  Cyclic GFR-binding peptide
IVNSSDDIKRVQVPRLQT

SEQ ID NO: 11559 - protein, 18 aa, Artificial Sequence
  Cyclic GFR-binding peptide
IVNSSDDIKRVQVPRLKT

SEQ ID NO: 11560 - protein, 29 aa, Artificial Sequence
  Cyclic GFR-binding peptide
  MOD_RES (23)..(23): Xaa is C or S
HQGQHPKIRYYVMPLPEEETPVXELGEDN

SEQ ID NO: 11561 - protein, 19 aa, Artificial Sequence
  Cyclic GFR-binding peptide
VKPTRGVVKAIKVSRLDQP

SEQ ID NO: 11562 - protein, 14 aa, Artificial Sequence
  Cyclic GFR-binding peptide
  MOD_RES (14)..(14): Xaa is C or S
VKAVKVSRLKTPAX

SEQ ID NO: 11563 - protein, 18 aa, Artificial Sequence
  Cyclic GFR-binding peptide
  MOD_RES (14)..(15): Xaa is C or S
IKRVQVPRLKTPAXXPKP

SEQ ID NO: 11564 - protein, 27 aa, Artificial Sequence
  Cyclic GFR-binding peptide
  MOD_RES (21)..(21): Xaa is C or S
IVNSSDDIKRVQVPRLKTPAXTPKTVH

SEQ ID NO: 11565 - protein, 24 aa, Artificial Sequence
  Cyclic GFR-binding peptide
  MOD_RES (18)..(18): Xaa is C or S
SSDDVKAVKVSRLKTPAXTPKTVH

SEQ ID NO: 11566 - protein, 19 aa, Artificial Sequence
  Cyclic GFR-binding peptide
VKPTRGVIKRIQVPRLDQP

SEQ ID NO: 11567 - protein, 21 aa, Artificial Sequence
  Cyclic GFR-binding peptide
  MOD_RES (15)..(16): Xaa is C or S
VVKAIKVSRLAQPVXXPAASA

SEQ ID NO: 11568 - protein, 19 aa, Artificial Sequence
  Cyclic GFR-binding peptide
  MOD_RES (14)..(15): Xaa is C or S
MIQMTINSLETPVXXAKPI

SEQ ID NO: 11569 - protein, 27 aa, Artificial Sequence
  Cyclic GFR-binding peptide
  MOD_RES (21)..(21): Xaa is C or S
IVNSSDDMIQVTINSLKTPAXTPKTVH

SEQ ID NO: 11570 - protein, 16 aa, Artificial Sequence
  Cyclic GFR-binding peptide
VVKDYEDVKAMKVSRL

SEQ ID NO: 11571 - protein, 27 aa, Artificial Sequence
  Cyclic GFR-binding peptide
  MOD_RES (21)..(22): Xaa is C or S
VVKDYEDIKRMQVPRLETPVXXAKPIS

SEQ ID NO: 11572 - protein, 16 aa, Artificial Sequence
  Cyclic GFR-binding peptide
  MOD_RES (14)..(15): Xaa is C or S
MIQITINSLAQPVXXP

SEQ ID NO: 11573 - protein, 28 aa, Artificial Sequence
  Cyclic GFR-binding peptide
  MOD_RES (24)..(24): Xaa is C or S
KPKKRVYEYYLVTLPEHHVRSPQXKVSS

SEQ ID NO: 11574 - protein, 16 aa, Artificial Sequence
  Cyclic GFR-binding peptide
  MOD_RES (14)..(15): Xaa is C or S
MIQITINSLDQPVXXP

SEQ ID NO: 11575 - protein, 14 aa, Artificial Sequence
  Cyclic GFR-binding peptide
YYVVPLPEHHVRSP

SEQ ID NO: 11576 - protein, 17 aa, Artificial Sequence
  Cyclic GFR-binding peptide
  MOD_RES (14)..(14): Xaa is C or S
MIQVTINSLKTPAXTPK

SEQ ID NO: 11577 - protein, 16 aa, Artificial Sequence
  Cyclic GFR-binding peptide
VVKDYEDIKRMQVPRL

SEQ ID NO: 11578 - protein, 24 aa, Artificial Sequence
  Cyclic GFR-binding peptide
  MOD_RES (18)..(18): Xaa is C or S
SSDDMIQVTINSLKTPAXTPKTVH

SEQ ID NO: 11579 - protein, 15 aa, Artificial Sequence
  Cyclic GFR-binding peptide
  MOD_RES (14)..(15): Xaa is C or S
MIQITINSLDQSVXX

SEQ ID NO: 11580 - protein, 15 aa, Artificial Sequence
  Cyclic GFR-binding peptide
VKPTRGVMIQITINS

SEQ ID NO: 11581 - protein, 27 aa, Artificial Sequence
  Cyclic GFR-binding peptide
  MOD_RES (21)..(21): Xaa is C or S
GQHPKIRYYVMPLPEEETPVXELGEDN

SEQ ID NO: 11582 - protein, 16 aa, Artificial Sequence
  Cyclic GFR-binding peptide
  MOD_RES (14)..(14): Xaa is C or S
YYVMPLPEEETPVXEL

SEQ ID NO: 11583 - protein, 25 aa, Artificial Sequence
  Cyclic GFR-binding peptide
  MOD_RES (19)..(19): Xaa is C or S
NSSDDIKRVQVPRLKTPAXTPKTVH

SEQ ID NO: 11584 - protein, 15 aa, Artificial Sequence
  Cyclic GFR-binding peptide
VVKENEDMIQMTINS

SEQ ID NO: 11585 - protein, 25 aa, Artificial Sequence
  Cyclic GFR-binding peptide
  MOD_RES (19)..(20): Xaa is C or S
PTKGIMIQITINSLDQSVXXPSASA

SEQ ID NO: 11586 - protein, 20 aa, Artificial Sequence
  Cyclic GFR-binding peptide
LKPKKRVYEYYVVPLPEHHV

SEQ ID NO: 11587 - protein, 25 aa, Artificial Sequence
  Cyclic GFR-binding peptide
  MOD_RES (19)..(19): Xaa is C or S
HPKIRYYLMTLPEEETPVXELGEDN

SEQ ID NO: 11588 - protein, 17 aa, Artificial Sequence
  Cyclic GFR-binding peptide
FIPKKRVIEYYVVPLPE

SEQ ID NO: 11589 - protein, 18 aa, Artificial Sequence
  Cyclic GFR-binding peptide
HQGQHPKIRYYVMPLPEE

SEQ ID NO: 11590 - protein, 21 aa, Artificial Sequence
  Cyclic GFR-binding peptide
  MOD_RES (17)..(17): Xaa is C or S
EYYLVTLPELQVQTPRXQVNR

SEQ ID NO: 11591 - protein, 22 aa, Artificial Sequence
  Cyclic GFR-binding peptide
  MOD_RES (16)..(17): Xaa is C or S
GVVKAIKVSRLAQPVXXPAASA

SEQ ID NO: 11592 - protein, 26 aa, Artificial Sequence
  Cyclic GFR-binding peptide
  MOD_RES (20)..(21): Xaa is C or S
KPTKGIIKRIQVPRLDQSVXXPSASA

SEQ ID NO: 11593 - protein, 18 aa, Artificial Sequence
  Cyclic GFR-binding peptide
VVKENEDIKRMQVPRLET

SEQ ID NO: 11594 - protein, 18 aa, Artificial Sequence
  Cyclic GFR-binding peptide
  MOD_RES (14)..(14): Xaa is C or S
MIQVTINSLKTPAXTPKT

SEQ ID NO: 11595 - protein, 21 aa, Artificial Sequence
  Cyclic GFR-binding peptide
  MOD_RES (15)..(16): Xaa is C or S
DIKRVQVPRLKTPAXXPKPVY

SEQ ID NO: 11596 - protein, 21 aa, Artificial Sequence
  Cyclic GFR-binding peptide
  MOD_RES (15)..(16): Xaa is C or S
IMIQITINSLDQSVXXPSASA

SEQ ID NO: 11597 - protein, 21 aa, Artificial Sequence
  Cyclic GFR-binding peptide
  MOD_RES (17)..(17): Xaa is C or S
EYYVVPLPEHHVRSPQXKVSS

SEQ ID NO: 11598 - protein, 15 aa, Artificial Sequence
  Cyclic GFR-binding peptide
  MOD_RES (14)..(15): Xaa is C or S
MIQITINSLDQPVXX

SEQ ID NO: 11599 - protein, 13 aa, Artificial Sequence
  Cyclic GFR-binding peptide
IKRVQVPRLKTPA

SEQ ID NO: 11600 - protein, 17 aa, Artificial Sequence
  Cyclic GFR-binding peptide
VKPTRGVVKAIKVSRLD

SEQ ID NO: 11601 - protein, 13 aa, Artificial Sequence
  Cyclic GFR-binding peptide
MIQVTINSLQTPA

SEQ ID NO: 11602 - protein, 18 aa, Artificial Sequence
  Cyclic GFR-binding peptide
FIPKKRVIEYYLVTLPEL

SEQ ID NO: 11603 - protein, 13 aa, Artificial Sequence
  Cyclic GFR-binding peptide
YYLVTLPELQVQT

SEQ ID NO: 11604 - protein, 15 aa, Artificial Sequence
  Cyclic GFR-binding peptide
  MOD_RES (14)..(15): Xaa is C or S
VKAMKVSRLETPVXX

SEQ ID NO: 11605 - protein, 25 aa, Artificial Sequence
  Cyclic GFR-binding peptide
  MOD_RES (19)..(20): Xaa is C or S
PTKGIVKAIKVSRLDQSVXXPSASA

SEQ ID NO: 11606 - protein, 17 aa, Artificial Sequence
  Cyclic GFR-binding peptide
  MOD_RES (14)..(14): Xaa is C or S
IKRVQVPRLKTPAXTPK

SEQ ID NO: 11607 - protein, 16 aa, Artificial Sequence
  Cyclic GFR-binding peptide
  MOD_RES (14)..(15): Xaa is C or S
IKRMQVPRLETPVXXA

SEQ ID NO: 11608 - protein, 14 aa, Artificial Sequence
  Cyclic GFR-binding peptide
YYLVTLPELQVQTP

SEQ ID NO: 11609 - protein, 17 aa, Artificial Sequence
  Cyclic GFR-binding peptide
VKPKRGVMIQITINSLA

SEQ ID NO: 11610 - protein, 21 aa, Artificial Sequence
  Cyclic GFR-binding peptide
LKPKKRVYEYYLVTLPEHHVR

SEQ ID NO: 11611 - protein, 19 aa, Artificial Sequence
  Cyclic GFR-binding peptide
  MOD_RES (16)..(16): Xaa is C or S
YYVVPLPELQVQTPRXQVN

SEQ ID NO: 11612 - protein, 13 aa, Artificial Sequence
  Cyclic GFR-binding peptide
YYVVPLPELQVQT

SEQ ID NO: 11613 - protein, 19 aa, Artificial Sequence
  Cyclic GFR-binding peptide
IKPTKGIIKRIQVPRLDQS

SEQ ID NO: 11614 - protein, 16 aa, Artificial Sequence
  Cyclic GFR-binding peptide
IKPTKGIMIQITINSL

SEQ ID NO: 11615 - protein, 22 aa, Artificial Sequence
  Cyclic GFR-binding peptide
  MOD_RES (16)..(17): Xaa is C or S
EDMIQMTINSLETPVXXAKPIK

SEQ ID NO: 11616 - protein, 17 aa, Artificial Sequence
  Cyclic GFR-binding peptide
  MOD_RES (14)..(15): Xaa is C or S
MIQVTINSLQTPAXXPK

SEQ ID NO: 11617 - protein, 19 aa, Artificial Sequence
  Cyclic GFR-binding peptide
  MOD_RES (14)..(15): Xaa is C or S
VKAVKVSRLKTPAXXPKPV

SEQ ID NO: 11618 - protein, 23 aa, Artificial Sequence
  Cyclic GFR-binding peptide
  MOD_RES (17)..(17): Xaa is C or S
KIRYYLMTLPEEETPVXELGEDN

SEQ ID NO: 11619 - protein, 20 aa, Artificial Sequence
  Cyclic GFR-binding peptide
  MOD_RES (14)..(15): Xaa is C or S
VKAIKVSRLDQSVXXPSASA

SEQ ID NO: 11620 - protein, 24 aa, Artificial Sequence
  Cyclic GFR-binding peptide
  MOD_RES (18)..(19): Xaa is C or S
KRGVMIQITINSLAQPVXXPAASA

SEQ ID NO: 11621 - protein, 14 aa, Artificial Sequence
  Cyclic GFR-binding peptide
  MOD_RES (14)..(14): Xaa is C or S
IKRIQVPRLAQPVX

SEQ ID NO: 11622 - protein, 21 aa, Artificial Sequence
  Cyclic GFR-binding peptide
  MOD_RES (15)..(16): Xaa is C or S
DVKAMKVSRLETPVXXAKPIK

SEQ ID NO: 11623 - protein, 24 aa, Artificial Sequence
  Cyclic GFR-binding peptide
  MOD_RES (18)..(19): Xaa is C or S
SSDDVKAVKVSRLKTPAXXPKPVY

SEQ ID NO: 11624 - protein, 15 aa, Artificial Sequence
  Cyclic GFR-binding peptide
IVNSSDDMIQVTINS

SEQ ID NO: 11625 - protein, 20 aa, Artificial Sequence
  Cyclic GFR-binding peptide
  MOD_RES (14)..(15): Xaa is C or S
VKAVKVSRLQTPAXXPKPVT

SEQ ID NO: 11626 - protein, 24 aa, Artificial Sequence
  Cyclic GFR-binding peptide
  MOD_RES (18)..(19): Xaa is C or S
SSDDMIQVTINSLKTPAXXPKPVY

SEQ ID NO: 11627 - protein, 21 aa, Artificial Sequence
  Cyclic GFR-binding peptide
  MOD_RES (15)..(16): Xaa is C or S
DMIQVTINSLQTPAXXPKPVT

SEQ ID NO: 11628 - protein, 18 aa, Artificial Sequence
  Cyclic GFR-binding peptide
  MOD_RES (14)..(15): Xaa is C or S
VKAIKVSRLDQPVXXPSA

SEQ ID NO: 11629 - protein, 28 aa, Artificial Sequence
  Cyclic GFR-binding peptide
  MOD_RES (24)..(24): Xaa is C or S
KPKKRVYEYYVVPLPEHHVRSPQXKVSS

SEQ ID NO: 11630 - protein, 16 aa, Artificial Sequence
  Cyclic GFR-binding peptide
  MOD_RES (14)..(14): Xaa is C or S
YYLMTLPEEETPVXEL

SEQ ID NO: 11631 - protein, 14 aa, Artificial Sequence
  Cyclic GFR-binding peptide
  MOD_RES (14)..(14): Xaa is C or S
VKAVKVSRLQTPAX

SEQ ID NO: 11632 - protein, 15 aa, Artificial Sequence
  Cyclic GFR-binding peptide
  MOD_RES (14)..(15): Xaa is C or S
MIQITINSLAQPVXX

SEQ ID NO: 11633 - protein, 14 aa, Artificial Sequence
  Cyclic GFR-binding peptide
  MOD_RES (14)..(14): Xaa is C or S
IKRIQVPRLDQPVX

SEQ ID NO: 11634 - protein, 18 aa, Artificial Sequence
  Cyclic GFR-binding peptide
  MOD_RES (14)..(15): Xaa is C or S
MIQVTINSLKTPAXXPKP

SEQ ID NO: 11635 - protein, 15 aa, Artificial Sequence
  Cyclic GFR-binding peptide
YYVVPLPELQVQTPR

SEQ ID NO: 11636 - protein, 18 aa, Artificial Sequence
  Cyclic GFR-binding peptide
  MOD_RES (14)..(15): Xaa is C or S
VKAMKVSRLETPVXXAKP

SEQ ID NO: 11637 - protein, 19 aa, Artificial Sequence
  Cyclic GFR-binding peptide
  MOD_RES (14)..(15): Xaa is C or S
VKAIKVSRLAQPVXXPAAS

SEQ ID NO: 11638 - protein, 22 aa, Artificial Sequence
  Cyclic GFR-binding peptide
  MOD_RES (16)..(17): Xaa is C or S
EDVKAMKVSRLETPVXXAKPIK

SEQ ID NO: 11639 - protein, 16 aa, Artificial Sequence
  Cyclic GFR-binding peptide
  MOD_RES (16)..(16): Xaa is C or S
YYLVTLPELQVQTPRX

SEQ ID NO: 11640 - protein, 14 aa, Artificial Sequence
  Cyclic GFR-binding peptide
  MOD_RES (14)..(14): Xaa is C or S
MIQITINSLDQSVX

SEQ ID NO: 11641 - protein, 21 aa, Artificial Sequence
  Cyclic GFR-binding peptide
HQGQHPKIRYYVMPLPEEETP

SEQ ID NO: 11642 - protein, 18 aa, Artificial Sequence
  Cyclic GFR-binding peptide
  MOD_RES (14)..(15): Xaa is C or S
IKRVQVPRLQTPAXXPKP

SEQ ID NO: 11643 - protein, 18 aa, Artificial Sequence
  Cyclic GFR-binding peptide
VKPTRGVIKRIQVPRLDQ

SEQ ID NO: 11644 - protein, 23 aa, Artificial Sequence
  Cyclic GFR-binding peptide
  MOD_RES (17)..(17): Xaa is C or S
SDDVKAVKVSRLKTPAXTPKTVH

SEQ ID NO: 11645 - protein, 21 aa, Artificial Sequence
  Cyclic GFR-binding peptide
FIPKKRVIEYYLVTLPELQVQ

SEQ ID NO: 11646 - protein, 26 aa, Artificial Sequence
  Cyclic GFR-binding peptide
  MOD_RES (20)..(21): Xaa is C or S
KPTRGVIKRIQVPRLDQPVXXPSASA

SEQ ID NO: 11647 - protein, 26 aa, Artificial Sequence
  Cyclic GFR-binding peptide
  MOD_RES (22)..(22): Xaa is C or S
KKRVIEYYLVTLPELQVQTPRXQVNR

SEQ ID NO: 11648 - protein, 17 aa, Artificial Sequence
  Cyclic GFR-binding peptide
  MOD_RES (14)..(15): Xaa is C or S
MIQVTINSLKTPAXXPK

SEQ ID NO: 11649 - protein, 21 aa, Artificial Sequence
  Cyclic GFR-binding peptide
  MOD_RES (15)..(16): Xaa is C or S
DMIQMTINSLETPVXXAKPIS

SEQ ID NO: 11650 - protein, 20 aa, Artificial Sequence
  Cyclic GFR-binding peptide
HQGQHPKIRYYVMPLPEEET

SEQ ID NO: 11651 - protein, 25 aa, Artificial Sequence
  Cyclic GFR-binding peptide
  MOD_RES (19)..(20): Xaa is C or S
PTRGVVKAIKVSRLDQPVXXPSASA

SEQ ID NO: 11652 - protein, 21 aa, Artificial Sequence
  Cyclic GFR-binding peptide
  MOD_RES (15)..(16): Xaa is C or S
VMIQITINSLDQPVXXPSASA

SEQ ID NO: 11653 - protein, 20 aa, Artificial Sequence
  Cyclic GFR-binding peptide
  MOD_RES (14)..(15): Xaa is C or S
VKAMKVSRLETPVXXAKPIS

SEQ ID NO: 11654 - protein, 25 aa, Artificial Sequence
  Cyclic GFR-binding peptide
  MOD_RES (19)..(20): Xaa is C or S
KENEDVKAMKVSRLETPVXXAKPIK

SEQ ID NO: 11655 - protein, 15 aa, Artificial Sequence
  Cyclic GFR-binding peptide
IKPTKGIIKRIQVPR

SEQ ID NO: 11656 - protein, 27 aa, Artificial Sequence
  Cyclic GFR-binding peptide
  MOD_RES (21)..(22): Xaa is C or S
IVNSSDDVKAVKVSRLKTPAXXPKPVY

SEQ ID NO: 11657 - protein, 19 aa, Artificial Sequence
  Cyclic GFR-binding peptide
HQGQHPKIRYYVMPLPEEE

SEQ ID NO: 11658 - protein, 17 aa, Artificial Sequence
  Cyclic GFR-binding peptide
LKPKKRVYEYYLVTLPE

SEQ ID NO: 11659 - protein, 19 aa, Artificial Sequence
  Cyclic GFR-binding peptide
  MOD_RES (16)..(16): Xaa is C or S
YYLVTLPELQVQTPRXQVN

SEQ ID NO: 11660 - protein, 19 aa, Artificial Sequence
  Cyclic GFR-binding peptide
LKPKKRVYEYYLVTLPEHH

SEQ ID NO: 11661 - protein, 15 aa, Artificial Sequence
  Cyclic GFR-binding peptide
  MOD_RES (1)..(2): Xaa is C or S
XXVSQDLRSVKIAKV

SEQ ID NO: 11662 - protein, 22 aa, Artificial Sequence
  Cyclic GFR-binding peptide
  MOD_RES (5)..(5): Xaa is C or S
SSVKXQPSRVHHEPLPVVYYEY

SEQ ID NO: 11663 - protein, 20 aa, Artificial Sequence
  Cyclic GFR-binding peptide
  MOD_RES (6)..(7): Xaa is C or S
YVPKPXXAPTKLRSVKVAKV

SEQ ID NO: 11664 - protein, 28 aa, Artificial Sequence
  Cyclic GFR-binding peptide
  MOD_RES (5)..(5): Xaa is C or S
RNVQXRPTQVQLEPLPVVYYEIVRKKPI

SEQ ID NO: 11665 - protein, 23 aa, Artificial Sequence
  Cyclic GFR-binding peptide
  MOD_RES (6)..(7): Xaa is C or S
ASAAPXXVPQALRPVQIRKIVGR

SEQ ID NO: 11666 - protein, 19 aa, Artificial Sequence
  Cyclic GFR-binding peptide
  MOD_RES (5)..(6): Xaa is C or S
VPKPXXAPTQLRSVKVAKV

SEQ ID NO: 11667 - protein, 26 aa, Artificial Sequence
  Cyclic GFR-binding peptide
  MOD_RES (7)..(7): Xaa is C or S
NDEGLEXVPTEEEPLTMLYYRIKPHQ

SEQ ID NO: 11668 - protein, 16 aa, Artificial Sequence
  Cyclic GFR-binding peptide
LRSVKMAKVDENEKVV

SEQ ID NO: 11669 - protein, 21 aa, Artificial Sequence
  Cyclic GFR-binding peptide
  MOD_RES (6)..(7): Xaa is C or S
KIPKAXXVPTELSNITMQIMD

SEQ ID NO: 11670 - protein, 18 aa, Artificial Sequence
  Cyclic GFR-binding peptide
QDLRSVKIAKVIGKTPKI

SEQ ID NO: 11671 - protein, 17 aa, Artificial Sequence
  Cyclic GFR-binding peptide
  MOD_RES (3)..(4): Xaa is C or S
APXXVPQALRPVQIRKI

SEQ ID NO: 11672 - protein, 18 aa, Artificial Sequence
  Cyclic GFR-binding peptide
TELSNITMQIMDEYDKVV

SEQ ID NO: 11673 - protein, 22 aa, Artificial Sequence
  Cyclic GFR-binding peptide
  MOD_RES (6)..(7): Xaa is C or S
SIPKAXXVPTELSNITMQIMDE

SEQ ID NO: 11674 - protein, 14 aa, Artificial Sequence
  Cyclic GFR-binding peptide
  MOD_RES (1)..(1): Xaa is C or S
XVPTELSNITMQIM

SEQ ID NO: 11675 - protein, 13 aa, Artificial Sequence
  Cyclic GFR-binding peptide
VSQDLRSVKIAKV

SEQ ID NO: 11676 - protein, 24 aa, Artificial Sequence
  Cyclic GFR-binding peptide
  MOD_RES (6)..(7): Xaa is C or S
KIPKAXXVPTELRSVKMAKVDENE

SEQ ID NO: 11677 - protein, 27 aa, Artificial Sequence
  Cyclic GFR-binding peptide
  MOD_RES (6)..(7): Xaa is C or S
ASAAPXXVPQALRPVQIRKIVGRKPKV

SEQ ID NO: 11678 - protein, 15 aa, Artificial Sequence
  Cyclic GFR-binding peptide
RPVQIRKIVGRKPKV

SEQ ID NO: 11679 - protein, 14 aa, Artificial Sequence
  Cyclic GFR-binding peptide
  MOD_RES (1)..(1): Xaa is C or S
XVPQDLSNITIQIM

SEQ ID NO: 11680 - protein, 22 aa, Artificial Sequence
  Cyclic GFR-binding peptide
  MOD_RES (6)..(7): Xaa is C or S
ASASPXXVSQDLSNITIQIMIG

SEQ ID NO: 11681 - protein, 23 aa, Artificial Sequence
  Cyclic GFR-binding peptide
  MOD_RES (6)..(7): Xaa is C or S
SIPKAXXVPTELSNITMQIMDEY

SEQ ID NO: 11682 - protein, 14 aa, Artificial Sequence
  Cyclic GFR-binding peptide
  MOD_RES (1)..(1): Xaa is C or S
XVPTEEEPLTMLYY

SEQ ID NO: 11683 - protein, 18 aa, Artificial Sequence
  Cyclic GFR-binding peptide
  MOD_RES (5)..(5): Xaa is C or S
TKPTXAPTKLRPVQVRKI

SEQ ID NO: 11684 - protein, 17 aa, Artificial Sequence
  Cyclic GFR-binding peptide
ELSNITMQIMDENEKVV

SEQ ID NO: 11685 - protein, 14 aa, Artificial Sequence
  Cyclic GFR-binding peptide
  MOD_RES (1)..(1): Xaa is C or S
XVPTELRPVQMRKI

SEQ ID NO: 11686 - protein, 16 aa, Artificial Sequence
  Cyclic GFR-binding peptide
LSNITMQIMDENEKVV

SEQ ID NO: 11687 - protein, 17 aa, Artificial Sequence
  Cyclic GFR-binding peptide
  MOD_RES (3)..(4): Xaa is C or S
KPXXAPTQLRPVQVRKI

SEQ ID NO: 11688 - protein, 22 aa, Artificial Sequence
  Cyclic GFR-binding peptide
  MOD_RES (7)..(7): Xaa is C or S
HVTKPTXAPTKLRPVQVRKIDD

SEQ ID NO: 11689 - protein, 18 aa, Artificial Sequence
  Cyclic GFR-binding peptide
QDLSNITIQIMIGKTPKI

SEQ ID NO: 11690 - protein, 25 aa, Artificial Sequence
  Cyclic GFR-binding peptide
  MOD_RES (7)..(7): Xaa is C or S
HVTKPTXAPTKLRSVKVAKVDDSSN

SEQ ID NO: 11691 - protein, 17 aa, Artificial Sequence
  Cyclic GFR-binding peptide
  MOD_RES (3)..(4): Xaa is C or S
APXXVPQALSNITIQIM

SEQ ID NO: 11692 - protein, 18 aa, Artificial Sequence
  Cyclic GFR-binding peptide
TELRSVKMAKVDEYDKVV

SEQ ID NO: 11693 - protein, 22 aa, Artificial Sequence
  Cyclic GFR-binding peptide
  MOD_RES (6)..(7): Xaa is C or S
KIPKAXXVPTELRPVQMRKIDE

SEQ ID NO: 11694 - protein, 18 aa, Artificial Sequence
  Cyclic GFR-binding peptide
  MOD_RES (4)..(5): Xaa is C or S
PKAXXVPTELSNITMQIM

SEQ ID NO: 11695 - protein, 23 aa, Artificial Sequence
  Cyclic GFR-binding peptide
  MOD_RES (5)..(5): Xaa is C or S
SSVKXQPSRVHHEPLTVLYYEYV

SEQ ID NO: 11696 - protein, 17 aa, Artificial Sequence
  Cyclic GFR-binding peptide
  MOD_RES (3)..(4): Xaa is C or S
SPXXVSQDLRSVKIAKV

SEQ ID NO: 11697 - protein, 21 aa, Artificial Sequence
  Cyclic GFR-binding peptide
  MOD_RES (7)..(7): Xaa is C or S
HVTKPTXAPTKLRPVQVRKID

SEQ ID NO: 11698 - protein, 25 aa, Artificial Sequence
  Cyclic GFR-binding peptide
  MOD_RES (6)..(7): Xaa is C or S
SIPKAXXVPTELRPVQMRKIDEYDK

SEQ ID NO: 11699 - protein, 27 aa, Artificial Sequence
  Cyclic GFR-binding peptide
  MOD_RES (6)..(7): Xaa is C or S
ASASPXXVSQDLRSVKIAKVIGKTPKI

SEQ ID NO: 11700 - protein, 19 aa, Artificial Sequence
  Cyclic GFR-binding peptide
PTELRSVKMAKVDEYDKVV

SEQ ID NO: 11701 - protein, 13 aa, Artificial Sequence
  Cyclic GFR-binding peptide
VPTELRPVQMRKI

SEQ ID NO: 11702 - protein, 21 aa, Artificial Sequence
  Cyclic GFR-binding peptide
  MOD_RES (6)..(7): Xaa is C or S
ASASPXXVSQDLRSVKIAKVI

SEQ ID NO: 11703 - protein, 25 aa, Artificial Sequence
  Cyclic GFR-binding peptide
  MOD_RES (6)..(7): Xaa is C or S
SIPKAXXVPTELSNITMQIMDEYDK

SEQ ID NO: 11704 - protein, 19 aa, Artificial Sequence
  Cyclic GFR-binding peptide
  MOD_RES (5)..(6): Xaa is C or S
SASPXXVSQDLRSVKIAKV

SEQ ID NO: 11705 - protein, 24 aa, Artificial Sequence
  Cyclic GFR-binding peptide
  MOD_RES (6)..(7): Xaa is C or S
ASASPXXVPQDLRSVKIAKVVGRT

SEQ ID NO: 11706 - protein, 19 aa, Artificial Sequence
  Cyclic GFR-binding peptide
QLEPLTVLYYEIVRKKPIF

SEQ ID NO: 11707 - protein, 14 aa, Artificial Sequence
  Cyclic GFR-binding peptide
  MOD_RES (1)..(1): Xaa is C or S
XVPTEEEPLPMVYY

SEQ ID NO: 11708 - protein, 19 aa, Artificial Sequence
  Cyclic GFR-binding peptide
  MOD_RES (5)..(6): Xaa is C or S
IPKAXXVPTELRSVKMAKV

SEQ ID NO: 11709 - protein, 26 aa, Artificial Sequence
  Cyclic GFR-binding peptide
  MOD_RES (7)..(7): Xaa is C or S
HVTKPTXAPTKLRSVKVAKVDDSSNV

SEQ ID NO: 11710 - protein, 24 aa, Artificial Sequence
  Cyclic GFR-binding peptide
  MOD_RES (6)..(7): Xaa is C or S
KIPKAXXVPTELSNITMQIMDENE

SEQ ID NO: 11711 - protein, 28 aa, Artificial Sequence
  Cyclic GFR-binding peptide
  MOD_RES (7)..(7): Xaa is C or S
NDEGLEXVPTEEEPLPMVYYRIKPHQGQ

SEQ ID NO: 11712 - protein, 27 aa, Artificial Sequence
  Cyclic GFR-binding peptide
  MOD_RES (5)..(5): Xaa is C or S
RNVQXRPTQVQLEPLPVVYYEIVRKKP

SEQ ID NO: 11713 - protein, 17 aa, Artificial Sequence
  Cyclic GFR-binding peptide
KLRPVQVRKIDDSSNVI

SEQ ID NO: 11714 - protein, 14 aa, Artificial Sequence
  Cyclic GFR-binding peptide
  MOD_RES (1)..(1): Xaa is C or S
XVPQALRSVKIAKV

SEQ ID NO: 11715 - protein, 16 aa, Artificial Sequence
  Cyclic GFR-binding peptide
LRPVQVRKIDDSSNVI

SEQ ID NO: 11716 - protein, 15 aa, Artificial Sequence
  Cyclic GFR-binding peptide
  MOD_RES (1)..(2): Xaa is C or S
XXVPTELRPVQMRKI

SEQ ID NO: 11717 - protein, 27 aa, Artificial Sequence
  Cyclic GFR-binding peptide
  MOD_RES (6)..(7): Xaa is C or S
ASASPXXVSQDLSNITIQIMIGKTPKI

SEQ ID NO: 11718 - protein, 26 aa, Artificial Sequence
  Cyclic GFR-binding peptide
  MOD_RES (7)..(7): Xaa is C or S
HVTKPTXAPTKLRPVQVRKIDDSSNV

SEQ ID NO: 11719 - protein, 14 aa, Artificial Sequence
  Cyclic GFR-binding peptide
  MOD_RES (1)..(1): Xaa is C or S
XVSQDLRPVQIRKI

SEQ ID NO: 11720 - protein, 15 aa, Artificial Sequence
  Cyclic GFR-binding peptide
  MOD_RES (2)..(2): Xaa is C or S
EXVPTEEEPLTMLYY

SEQ ID NO: 11721 - protein, 16 aa, Artificial Sequence
  Cyclic GFR-binding peptide
  MOD_RES (2)..(3): Xaa is C or S
AXXVPTELRSVKMAKV

SEQ ID NO: 11722 - protein, 17 aa, Artificial Sequence
  Cyclic GFR-binding peptide
QLRPVQVRKIDDSSNVI

SEQ ID NO: 11723 - protein, 21 aa, Artificial Sequence
  Cyclic GFR-binding peptide
  MOD_RES (6)..(7): Xaa is C or S
ASAAPXXVPQALSNITIQIMV

SEQ ID NO: 11724 - protein, 13 aa, Artificial Sequence
  Cyclic GFR-binding peptide
APTQLRSVKVAKV

SEQ ID NO: 11725 - protein, 23 aa, Artificial Sequence
  Cyclic GFR-binding peptide
  MOD_RES (6)..(7): Xaa is C or S
SIPKAXXVPTELRSVKMAKVDEY

SEQ ID NO: 11726 - protein, 19 aa, Artificial Sequence
  Cyclic GFR-binding peptide
PTELSNITMQIMDEYDKVV

SEQ ID NO: 11727 - protein, 15 aa, Artificial Sequence
  Cyclic GFR-binding peptide
  MOD_RES (1)..(2): Xaa is C or S
XXAPTQLRSVKVAKV

SEQ ID NO: 11728 - protein, 25 aa, Artificial Sequence
  Cyclic GFR-binding peptide
  MOD_RES (7)..(7): Xaa is C or S
HVTKPTXAPTKLSNITVQIMDDSSN

SEQ ID NO: 11729 - protein, 23 aa, Artificial Sequence
  Cyclic GFR-binding peptide
  MOD_RES (5)..(5): Xaa is C or S
SSVKXQPSRVHHEPLPVVYYEYV

SEQ ID NO: 11730 - protein, 17 aa, Artificial Sequence
  Cyclic GFR-binding peptide
  MOD_RES (3)..(4): Xaa is C or S
SPXXVPQDLSNITIQIM

SEQ ID NO: 11731 - protein, 24 aa, Artificial Sequence
  Cyclic GFR-binding peptide
  MOD_RES (6)..(7): Xaa is C or S
ASASPXXVPQDLSNITIQIMVGRT

SEQ ID NO: 11732 - protein, 21 aa, Artificial Sequence
  Cyclic GFR-binding peptide
  MOD_RES (6)..(7): Xaa is C or S
KIPKAXXVPTELRPVQMRKID

SEQ ID NO: 11733 - protein, 13 aa, Artificial Sequence
  Cyclic GFR-binding peptide
VPQDLRPVQIRKI

SEQ ID NO: 11734 - protein, 15 aa, Artificial Sequence
  Cyclic GFR-binding peptide
  MOD_RES (1)..(2): Xaa is C or S
XXVPQDLRPVQIRKI

SEQ ID NO: 11735 - protein, 15 aa, Artificial Sequence
  Cyclic GFR-binding peptide
  MOD_RES (1)..(2): Xaa is C or S
XXVPTELSNITMQIM

SEQ ID NO: 11736 - protein, 17 aa, Artificial Sequence
  Cyclic GFR-binding peptide
DLRPVQIRKIVGRTPKV

SEQ ID NO: 11737 - protein, 13 aa, Artificial Sequence
  Cyclic GFR-binding peptide
VPTEEEPLTMLYY

SEQ ID NO: 11738 - protein, 18 aa, Artificial Sequence
  Cyclic GFR-binding peptide
QALSNITIQIMVGRKPKV

SEQ ID NO: 11739 - protein, 16 aa, Artificial Sequence
  Cyclic GFR-binding peptide
LRPVQIRKIIGKTPKI

SEQ ID NO: 11740 - protein, 22 aa, Artificial Sequence
  Cyclic GFR-binding peptide
  MOD_RES (5)..(5): Xaa is C or S
SSVKXQPSRVHHEPLTVLYYEY

SEQ ID NO: 11741 - protein, 15 aa, Artificial Sequence
  Cyclic GFR-binding peptide
RPVQIRKIVGRTPKV

SEQ ID NO: 11742 - protein, 17 aa, Artificial Sequence
  Cyclic GFR-binding peptide
  MOD_RES (3)..(4): Xaa is C or S
KPXXAPTQLRSVKVAKV

SEQ ID NO: 11743 - protein, 15 aa, Artificial Sequence
  Cyclic GFR-binding peptide
  MOD_RES (1)..(2): Xaa is C or S
XXVPQDLRSVKIAKV

SEQ ID NO: 11744 - protein, 19 aa, Artificial Sequence
  Cyclic GFR-binding peptide
  MOD_RES (5)..(6): Xaa is C or S
IPKAXXVPTELRPVQMRKI

SEQ ID NO: 11745 - protein, 26 aa, Artificial Sequence
  Cyclic GFR-binding peptide
  MOD_RES (6)..(7): Xaa is C or S
SIPKAXXVPTELRSVKMAKVDEYDKV

SEQ ID NO: 11746 - protein, 18 aa, Artificial Sequence
  Cyclic GFR-binding peptide
HEPLTVLYYEYVRKKPKL

SEQ ID NO: 11747 - protein, 18 aa, Artificial Sequence
  Cyclic GFR-binding peptide
QALRSVKIAKVVGRKPKV

SEQ ID NO: 11748 - protein, 18 aa, Artificial Sequence
  Cyclic GFR-binding peptide
  MOD_RES (5)..(5): Xaa is C or S
TKPTXAPTKLRSVKVAKV

SEQ ID NO: 11749 - protein, 17 aa, Artificial Sequence
  Cyclic GFR-binding peptide
  MOD_RES (3)..(4): Xaa is C or S
SPXXVSQDLRPVQIRKI

SEQ ID NO: 11750 - protein, 26 aa, Artificial Sequence
  Cyclic GFR-binding peptide
  MOD_RES (6)..(7): Xaa is C or S
ASASPXXVSQDLSNITIQIMIGKTPK

SEQ ID NO: 11751 - protein, 19 aa, Artificial Sequence
  Cyclic GFR-binding peptide
  MOD_RES (5)..(6): Xaa is C or S
SASPXXVPQDLRPVQIRKI

SEQ ID NO: 11752 - protein, 16 aa, Artificial Sequence
  Cyclic GFR-binding peptide
  MOD_RES (3)..(3): Xaa is C or S
PTXAPTKLRSVKVAKV

SEQ ID NO: 11753 - protein, 22 aa, Artificial Sequence
  Cyclic GFR-binding peptide
  MOD_RES (6)..(7): Xaa is C or S
ASAAPXXVPQALRPVQIRKIVG

SEQ ID NO: 11754 - protein, 21 aa, Artificial Sequence
  Cyclic GFR-binding peptide
  MOD_RES (6)..(7): Xaa is C or S
ASAAPXXVPQALRPVQIRKIV

SEQ ID NO: 11755 - protein, 15 aa, Artificial Sequence
  Cyclic GFR-binding peptide
RSVKMAKVDENEKVV

SEQ ID NO: 11756 - protein, 17 aa, Artificial Sequence
  Cyclic GFR-binding peptide
  MOD_RES (4)..(4): Xaa is C or S
GLEXVPTEEEPLTMLYY

SEQ ID NO: 11757 - protein, 16 aa, Artificial Sequence
  Cyclic GFR-binding peptide
  MOD_RES (2)..(3): Xaa is C or S
PXXAPTKLRPVQVRKI

SEQ ID NO: 11758 - protein, 13 aa, Artificial Sequence
  Cyclic GFR-binding peptide
VPQDLRSVKIAKV

SEQ ID NO: 11759 - protein, 22 aa, Artificial Sequence
  Cyclic GFR-binding peptide
  MOD_RES (6)..(7): Xaa is C or S
ASAAPXXVPQALSNITIQIMVG

SEQ ID NO: 11760 - protein, 15 aa, Artificial Sequence
  Cyclic GFR-binding peptide
RSVKMAKVDEYDKVV

SEQ ID NO: 11761 - protein, 18 aa, Artificial Sequence
  Cyclic GFR-binding peptide
HEPLPVVYYEYVRKKPKL

SEQ ID NO: 11762 - protein, 15 aa, Artificial Sequence
  Cyclic GFR-binding peptide
RPVQVRKIDDSSNVI

SEQ ID NO: 11763 - protein, 26 aa, Artificial Sequence
  Cyclic GFR-binding peptide
  MOD_RES (6)..(7): Xaa is C or S
ASASPXXVPQDLSNITIQIMVGRTPK

SEQ ID NO: 11764 - protein, 16 aa, Artificial Sequence
  Cyclic GFR-binding peptide
  MOD_RES (2)..(3): Xaa is C or S
PXXAPTKLRSVKVAKV

SEQ ID NO: 11765 - protein, 23 aa, Artificial Sequence
  Cyclic GFR-binding peptide
  MOD_RES (6)..(7): Xaa is C or S
YVPKPXXAPTKLRSVKVAKVDDS

SEQ ID NO: 11766 - protein, 17 aa, Artificial Sequence
  Cyclic GFR-binding peptide
  MOD_RES (3)..(4): Xaa is C or S
SPXXVSQDLSNITIQIM

SEQ ID NO: 11767 - protein, 16 aa, Artificial Sequence
  Cyclic GFR-binding peptide
  MOD_RES (3)..(3): Xaa is C or S
PTXAPTKLRPVQVRKI

SEQ ID NO: 11768 - protein, 18 aa, Artificial Sequence
  Cyclic GFR-binding peptide
QDLRSVKIAKVVGRTPKV

SEQ ID NO: 11769 - protein, 25 aa, Artificial Sequence
  Cyclic GFR-binding peptide
  MOD_RES (6)..(7): Xaa is C or S
SIPKAXXVPTELRSVKMAKVDEYDK

SEQ ID NO: 11770 - protein, 15 aa, Artificial Sequence
  Cyclic GFR-binding peptide
  MOD_RES (1)..(2): Xaa is C or S
XXVPQALRSVKIAKV

SEQ ID NO: 11771 - protein, 13 aa, Artificial Sequence
  Cyclic GFR-binding peptide
VPTELSNITMQIM

SEQ ID NO: 11772 - protein, 29 aa, Artificial Sequence
  Cyclic GFR-binding peptide
  MOD_RES (5)..(5): Xaa is C or S
RNVQXRPTQVQLEPLPVVYYEIVRKKPIF

SEQ ID NO: 11773 - protein, 26 aa, Artificial Sequence
  Cyclic GFR-binding peptide
  MOD_RES (6)..(7): Xaa is C or S
YVPKPXXAPTKLRSVKVAKVDDSSNV

SEQ ID NO: 11774 - protein, 15 aa, Artificial Sequence
  Cyclic GFR-binding peptide
  MOD_RES (1)..(2): Xaa is C or S
XXVSQDLRPVQIRKI

SEQ ID NO: 11775 - protein, 20 aa, Artificial Sequence
  Cyclic GFR-binding peptide
  MOD_RES (6)..(7): Xaa is C or S
YVPKPXXAPTKLRPVQVRKI

SEQ ID NO: 11776 - protein, 22 aa, Artificial Sequence
  Cyclic GFR-binding peptide
  MOD_RES (7)..(7): Xaa is C or S
HVTKPTXAPTKLSNITVQIMDD

SEQ ID NO: 11777 - protein, 24 aa, Artificial Sequence
  Cyclic GFR-binding peptide
  MOD_RES (7)..(7): Xaa is C or S
HVTKPTXAPTKLRPVQVRKIDDSS

SEQ ID NO: 11778 - protein, 26 aa, Artificial Sequence
  Cyclic GFR-binding peptide
  MOD_RES (6)..(7): Xaa is C or S
YVPKPXXAPTKLRPVQVRKIDDSSNV

SEQ ID NO: 11779 - protein, 15 aa, Artificial Sequence
  Cyclic GFR-binding peptide
SNITMQIMDEYDKVV

SEQ ID NO: 11780 - protein, 14 aa, Artificial Sequence
  Cyclic GFR-binding peptide
  MOD_RES (1)..(1): Xaa is C or S
XVSQDLRSVKIAKV

SEQ ID NO: 11781 - protein, 27 aa, Artificial Sequence
  Cyclic GFR-binding peptide
  MOD_RES (6)..(7): Xaa is C or S
YVPKPXXAPTKLRPVQVRKIDDSSNVI

SEQ ID NO: 11782 - protein, 26 aa, Artificial Sequence
  Cyclic GFR-binding peptide
  MOD_RES (5)..(5): Xaa is C or S
RNVQXRPTQVQLEPLPVVYYEIVRKK

SEQ ID NO: 11783 - protein, 13 aa, Artificial Sequence
  Cyclic GFR-binding peptide
VSQDLRPVQIRKI

SEQ ID NO: 11784 - protein, 19 aa, Artificial Sequence
  Cyclic GFR-binding peptide
  MOD_RES (5)..(6): Xaa is C or S
SAAPXXVPQALSNITIQIM

SEQ ID NO: 11785 - protein, 18 aa, Artificial Sequence
  Cyclic GFR-binding peptide
QDLSNITIQIMVGRTPKV

SEQ ID NO: 11786 - protein, 26 aa, Artificial Sequence
  Cyclic GFR-binding peptide
  MOD_RES (6)..(7): Xaa is C or S
ASAAPXXVPQALRSVKIAKVVGRKPK

SEQ ID NO: 11787 - protein, 17 aa, Artificial Sequence
  Cyclic GFR-binding peptide
  MOD_RES (3)..(4): Xaa is C or S
SPXXVPQDLRPVQIRKI

SEQ ID NO: 11788 - protein, 13 aa, Artificial Sequence
  Cyclic GFR-binding peptide
VPTEEEPLPMVYY

SEQ ID NO: 11789 - protein, 22 aa, Artificial Sequence
  Cyclic GFR-binding peptide
  MOD_RES (6)..(7): Xaa is C or S
SIPKAXXVPTELRPVQMRKIDE

SEQ ID NO: 11790 - protein, 13 aa, Artificial Sequence
  Cyclic GFR-binding peptide
VPQALRSVKIAKV

SEQ ID NO: 11791 - protein, 19 aa, Artificial Sequence
  Cyclic GFR-binding peptide
PTELRPVQMRKIDENEKVV

SEQ ID NO: 11792 - protein, 19 aa, Artificial Sequence
  Cyclic GFR-binding peptide
  MOD_RES (5)..(6): Xaa is C or S
SASPXXVPQDLRSVKIAKV

SEQ ID NO: 11793 - protein, 26 aa, Artificial Sequence
  Cyclic GFR-binding peptide
  MOD_RES (6)..(7): Xaa is C or S
TVPKPXXAPTQLRPVQVRKIDDSSNV

SEQ ID NO: 11794 - protein, 21 aa, Artificial Sequence
  Cyclic GFR-binding peptide
  MOD_RES (5)..(5): Xaa is C or S
SSVKXQPSRVHHEPLTVLYYE

SEQ ID NO: 11795 - protein, 21 aa, Artificial Sequence
  Cyclic GFR-binding peptide
  MOD_RES (7)..(7): Xaa is C or S
HVTKPTXAPTKLSNITVQIMD

SEQ ID NO: 11796 - protein, 17 aa, Artificial Sequence
  Cyclic GFR-binding peptide
  MOD_RES (4)..(4): Xaa is C or S
GLEXVPTEEEPLPMVYY

SEQ ID NO: 11797 - protein, 23 aa, Artificial Sequence
  Cyclic GFR-binding peptide
  MOD_RES (6)..(7): Xaa is C or S
YVPKPXXAPTKLSNITVQIMDDS

SEQ ID NO: 11798 - protein, 25 aa, Artificial Sequence
  Cyclic GFR-binding peptide
  MOD_RES (6)..(7): Xaa is C or S
ASASPXXVSQDLRPVQIRKIIGKTP

SEQ ID NO: 11799 - protein, 20 aa, Artificial Sequence
  Cyclic GFR-binding peptide
  MOD_RES (6)..(7): Xaa is C or S
SIPKAXXVPTELSNITMQIM

SEQ ID NO: 11800 - protein, 21 aa, Artificial Sequence
  Cyclic GFR-binding peptide
PTEEEPLTMLYYRIKPHQGQH

SEQ ID NO: 11801 - protein, 17 aa, Artificial Sequence
  Cyclic GFR-binding peptide
  MOD_RES (3)..(4): Xaa is C or S
KPXXAPTKLRSVKVAKV

SEQ ID NO: 11802 - protein, 15 aa, Artificial Sequence
  Cyclic GFR-binding peptide
  MOD_RES (2)..(2): Xaa is C or S
TXAPTKLSNITVQIM

SEQ ID NO: 11803 - protein, 25 aa, Artificial Sequence
  Cyclic GFR-binding peptide
  MOD_RES (5)..(5): Xaa is C or S
SSVKXQPSRVHHEPLPVVYYEYVRK

SEQ ID NO: 11804 - protein, 20 aa, Artificial Sequence
  Cyclic GFR-binding peptide
  MOD_RES (6)..(7): Xaa is C or S
ASAAPXXVPQALRSVKIAKV

SEQ ID NO: 11805 - protein, 27 aa, Artificial Sequence
  Cyclic GFR-binding peptide
  MOD_RES (6)..(7): Xaa is C or S
YVPKPXXAPTKLSNITVQIMDDSSNVI

SEQ ID NO: 11806 - protein, 23 aa, Artificial Sequence
  Cyclic GFR-binding peptide
  MOD_RES (6)..(7): Xaa is C or S
ASASPXXVPQDLRPVQIRKIVGR

SEQ ID NO: 11807 - protein, 27 aa, Artificial Sequence
  Cyclic GFR-binding peptide
  MOD_RES (5)..(5): Xaa is C or S
RNVQXRPTQVQLEPLTVLYYEIVRKKP

SEQ ID NO: 11808 - protein, 22 aa, Artificial Sequence
  Cyclic GFR-binding peptide
  MOD_RES (6)..(7): Xaa is C or S
ASASPXXVPQDLRPVQIRKIVG

SEQ ID NO: 11809 - protein, 23 aa, Artificial Sequence
  Cyclic GFR-binding peptide
  MOD_RES (6)..(7): Xaa is C or S
TVPKPXXAPTQLSNITVQIMDDS

SEQ ID NO: 11810 - protein, 17 aa, Artificial Sequence
  Cyclic GFR-binding peptide
DLRPVQIRKIIGKTPKI

SEQ ID NO: 11811 - protein, 20 aa, Artificial Sequence
  Cyclic GFR-binding peptide
  MOD_RES (6)..(7): Xaa is C or S
YVPKPXXAPTKLSNITVQIM

SEQ ID NO: 11812 - protein, 18 aa, Artificial Sequence
  Cyclic GFR-binding peptide
  MOD_RES (4)..(5): Xaa is C or S
ASPXXVPQDLRPVQIRKI

SEQ ID NO: 11813 - protein, 17 aa, Artificial Sequence
  Cyclic GFR-binding peptide
  MOD_RES (2)..(2): Xaa is C or S
QXRPTQVQLEPLTVLYY

SEQ ID NO: 11814 - protein, 23 aa, Artificial Sequence
  Cyclic GFR-binding peptide
  MOD_RES (7)..(7): Xaa is C or S
HVTKPTXAPTKLRPVQVRKIDDS

SEQ ID NO: 11815 - protein, 18 aa, Artificial Sequence
  Cyclic GFR-binding peptide
  MOD_RES (3)..(3): Xaa is C or S
VQXRPTQVQLEPLTVLYY

SEQ ID NO: 11816 - protein, 23 aa, Artificial Sequence
  Cyclic GFR-binding peptide
  MOD_RES (6)..(7): Xaa is C or S
KIPKAXXVPTELRPVQMRKIDEN

SEQ ID NO: 11817 - protein, 18 aa, Artificial Sequence
  Cyclic GFR-binding peptide
TKLSNITVQIMDDSSNVI

SEQ ID NO: 11818 - protein, 20 aa, Artificial Sequence
  Cyclic GFR-binding peptide
  MOD_RES (5)..(5): Xaa is C or S
RNVQXRPTQVQLEPLTVLYY

SEQ ID NO: 11819 - protein, 16 aa, Artificial Sequence
  Cyclic GFR-binding peptide
LRSVKIAKVVGRTPKV

SEQ ID NO: 11820 - protein, 22 aa, Artificial Sequence
  Cyclic GFR-binding peptide
  MOD_RES (6)..(7): Xaa is C or S
YVPKPXXAPTKLSNITVQIMDD

SEQ ID NO: 11821 - protein, 17 aa, Artificial Sequence
  Cyclic GFR-binding peptide
EPLTMLYYRIKPHQGQH

SEQ ID NO: 11822 - protein, 14 aa, Artificial Sequence
  Cyclic GFR-binding peptide
  MOD_RES (1)..(1): Xaa is C or S
XAPTQLSNITVQIM

SEQ ID NO: 11823 - protein, 18 aa, Artificial Sequence
  Cyclic GFR-binding peptide
TQLSNITVQIMDDSSNVI

SEQ ID NO: 11824 - protein, 27 aa, Artificial Sequence
  Cyclic GFR-binding peptide
  MOD_RES (6)..(7): Xaa is C or S
ASASPXXVPQDLSNITIQIMVGRTPKV

SEQ ID NO: 11825 - protein, 19 aa, Artificial Sequence
  Cyclic GFR-binding peptide
  MOD_RES (5)..(6): Xaa is C or S
SASPXXVPQDLSNITIQIM

SEQ ID NO: 11826 - protein, 16 aa, Artificial Sequence
  Cyclic GFR-binding peptide
LRPVQIRKIVGRTPKV

SEQ ID NO: 11827 - protein, 17 aa, Artificial Sequence
  Cyclic GFR-binding peptide
  MOD_RES (3)..(4): Xaa is C or S
APXXVPQALRSVKIAKV

SEQ ID NO: 11828 - protein, 13 aa, Artificial Sequence
  Cyclic GFR-binding peptide
SRVHHEPLTVLYY

SEQ ID NO: 11829 - protein, 19 aa, Artificial Sequence
  Cyclic GFR-binding peptide
  MOD_RES (5)..(6): Xaa is C or S
VPKPXXAPTQLSNITVQIM

SEQ ID NO: 11830 - protein, 22 aa, Artificial Sequence
  Cyclic GFR-binding peptide
  MOD_RES (6)..(7): Xaa is C or S
YVPKPXXAPTKLRSVKVAKVDD

SEQ ID NO: 11831 - protein, 27 aa, Artificial Sequence
  Cyclic GFR-binding peptide
  MOD_RES (6)..(7): Xaa is C or S
ASASPXXVPQDLRPVQIRKIVGRTPKV

SEQ ID NO: 11832 - protein, 22 aa, Artificial Sequence
  Cyclic GFR-binding peptide
  MOD_RES (6)..(7): Xaa is C or S
ASASPXXVPQDLRSVKIAKVVG

SEQ ID NO: 11833 - protein, 20 aa, Artificial Sequence
  Cyclic GFR-binding peptide
  MOD_RES (6)..(7): Xaa is C or S
TVPKPXXAPTQLRPVQVRKI

SEQ ID NO: 11834 - protein, 16 aa, Artificial Sequence
  Cyclic GFR-binding peptide
  MOD_RES (2)..(3): Xaa is C or S
PXXAPTKLSNITVQIM

SEQ ID NO: 11835 - protein, 19 aa, Artificial Sequence
  Cyclic GFR-binding peptide
  MOD_RES (5)..(6): Xaa is C or S
VPKPXXAPTQLRPVQVRKI

SEQ ID NO: 11836 - protein, 20 aa, Artificial Sequence
  Cyclic GFR-binding peptide
  MOD_RES (5)..(5): Xaa is C or S
SSVKXQPSRVHHEPLTVLYY

SEQ ID NO: 11837 - protein, 26 aa, Artificial Sequence
  Cyclic GFR-binding peptide
  MOD_RES (6)..(7): Xaa is C or S
TVPKPXXAPTQLRSVKVAKVDDSSNV

SEQ ID NO: 11838 - protein, 15 aa, Artificial Sequence
  Cyclic GFR-binding peptide
  MOD_RES (1)..(2): Xaa is C or S
XXAPTQLSNITVQIM

SEQ ID NO: 11839 - protein, 16 aa, Artificial Sequence
  Cyclic GFR-binding peptide
LRPVQIRKIVGRKPKV

SEQ ID NO: 11840 - protein, 16 aa, Artificial Sequence
  Cyclic GFR-binding peptide
  MOD_RES (2)..(3): Xaa is C or S
PXXVSQDLRPVQIRKI

SEQ ID NO: 11841 - protein, 13 aa, Artificial Sequence
  Cyclic GFR-binding peptide
VSQDLSNITIQIM

SEQ ID NO: 11842 - protein, 27 aa, Artificial Sequence
  Cyclic GFR-binding peptide
  MOD_RES (7)..(7): Xaa is C or S
HVTKPTXAPTKLRSVKVAKVDDSSNVI

SEQ ID NO: 11843 - protein, 18 aa, Artificial Sequence
  Cyclic GFR-binding peptide
  MOD_RES (3)..(3): Xaa is C or S
VQXRPTQVQLEPLPVVYY

SEQ ID NO: 11844 - protein, 19 aa, Artificial Sequence
  Cyclic GFR-binding peptide
  MOD_RES (4)..(4): Xaa is C or S
SVKXQPSRVHHEPLPVVYY

SEQ ID NO: 11845 - protein, 25 aa, Artificial Sequence
  Cyclic GFR-binding peptide
  MOD_RES (7)..(7): Xaa is C or S
NDEGLEXVPTEEEPLPMVYYRIKPH

SEQ ID NO: 11846 - protein, 15 aa, Artificial Sequence
  Cyclic GFR-binding peptide
RPVQMRKIDENEKVV

SEQ ID NO: 11847 - protein, 23 aa, Artificial Sequence
  Cyclic GFR-binding peptide
  MOD_RES (6)..(7): Xaa is C or S
TVPKPXXAPTQLRPVQVRKIDDS

SEQ ID NO: 11848 - protein, 19 aa, Artificial Sequence
  Cyclic GFR-binding peptide
PTKLRPVQVRKIDDSSNVI

SEQ ID NO: 11849 - protein, 18 aa, Artificial Sequence
  Cyclic GFR-binding peptide
  MOD_RES (4)..(5): Xaa is C or S
ASPXXVPQDLSNITIQIM

SEQ ID NO: 11850 - protein, 19 aa, Artificial Sequence
  Cyclic GFR-binding peptide
PTQLRPVQVRKIDDSSNVI

SEQ ID NO: 11851 - protein, 16 aa, Artificial Sequence
  Cyclic GFR-binding peptide
  MOD_RES (3)..(3): Xaa is C or S
PTXAPTKLSNITVQIM

SEQ ID NO: 11852 - protein, 16 aa, Artificial Sequence
  Cyclic GFR-binding peptide
LSNITMQIMDEYDKVV

SEQ ID NO: 11853 - protein, 18 aa, Artificial Sequence
  Cyclic GFR-binding peptide
EEPLTMLYYRIKPHQGQH

SEQ ID NO: 11854 - protein, 22 aa, Artificial Sequence
  Cyclic GFR-binding peptide
  MOD_RES (6)..(7): Xaa is C or S
YVPKPXXAPTKLRPVQVRKIDD

SEQ ID NO: 11855 - protein, 13 aa, Artificial Sequence
  Cyclic GFR-binding peptide
VPQALRPVQIRKI

SEQ ID NO: 11856 - protein, 26 aa, Artificial Sequence
  Cyclic GFR-binding peptide
  MOD_RES (6)..(7): Xaa is C or S
KIPKAXXVPTELSNITMQIMDENEKV

SEQ ID NO: 11857 - protein, 17 aa, Artificial Sequence
  Cyclic GFR-binding peptide
ELRSVKMAKVDEYDKVV

SEQ ID NO: 11858 - protein, 23 aa, Artificial Sequence
  Cyclic GFR-binding peptide
  MOD_RES (6)..(7): Xaa is C or S
YVPKPXXAPTKLRPVQVRKIDDS

SEQ ID NO: 11859 - protein, 19 aa, Artificial Sequence
  Cyclic GFR-binding peptide
  MOD_RES (5)..(6): Xaa is C or S
VPKPXXAPTKLSNITVQIM

SEQ ID NO: 11860 - protein, 23 aa, Artificial Sequence
  Cyclic GFR-binding peptide
  MOD_RES (6)..(7): Xaa is C or S
ASASPXXVPQDLRSVKIAKVVGR

SEQ ID NO: 11861 - protein, 18 aa, Artificial Sequence
  Cyclic GFR-binding peptide
  MOD_RES (4)..(5): Xaa is C or S
PKPXXAPTQLRSVKVAKV

SEQ ID NO: 11862 - protein, 19 aa, Artificial Sequence
  Cyclic GFR-binding peptide
PTKLSNITVQIMDDSSNVI

SEQ ID NO: 11863 - protein, 27 aa, Artificial Sequence
  Cyclic GFR-binding peptide
  MOD_RES (6)..(7): Xaa is C or S
TVPKPXXAPTQLRPVQVRKIDDSSNVI

SEQ ID NO: 11864 - protein, 17 aa, Artificial Sequence
  Cyclic GFR-binding peptide
ELRPVQMRKIDEYDKVV

SEQ ID NO: 11865 - protein, 19 aa, Artificial Sequence
  Cyclic GFR-binding peptide
PTQLSNITVQIMDDSSNVI

SEQ ID NO: 11866 - protein, 20 aa, Artificial Sequence
  Cyclic GFR-binding peptide
  MOD_RES (6)..(7): Xaa is C or S
ASASPXXVSQDLSNITIQIM

SEQ ID NO: 11867 - protein, 27 aa, Artificial Sequence
  Cyclic GFR-binding peptide
  MOD_RES (6)..(7): Xaa is C or S
SIPKAXXVPTELRSVKMAKVDEYDKVV

SEQ ID NO: 11868 - protein, 20 aa, Artificial Sequence
  Cyclic GFR-binding peptide
  MOD_RES (7)..(7): Xaa is C or S
HVTKPTXAPTKLRPVQVRKI

SEQ ID NO: 11869 - protein, 29 aa, Artificial Sequence
  Cyclic GFR-binding peptide
  MOD_RES (5)..(5): Xaa is C or S
RNVQXRPTQVQLEPLTVLYYEIVRKKPIF

SEQ ID NO: 11870 - protein, 26 aa, Artificial Sequence
  Cyclic GFR-binding peptide
  MOD_RES (6)..(7): Xaa is C or S
ASAAPXXVPQALSNITIQIMVGRKPK

SEQ ID NO: 11871 - protein, 16 aa, Artificial Sequence
  Cyclic GFR-binding peptide
  MOD_RES (2)..(3): Xaa is C or S
PXXAPTQLRPVQVRKI

SEQ ID NO: 11872 - protein, 24 aa, Artificial Sequence
  Cyclic GFR-binding peptide
  MOD_RES (6)..(7): Xaa is C or S
ASASPXXVSQDLRPVQIRKIIGKT

SEQ ID NO: 11873 - protein, 16 aa, Artificial Sequence
  Cyclic GFR-binding peptide
LRSVKIAKVVGRKPKV

SEQ ID NO: 11874 - protein, 17 aa, Artificial Sequence
  Cyclic GFR-binding peptide
  MOD_RES (2)..(2): Xaa is C or S
QXRPTQVQLEPLPVVYY

SEQ ID NO: 11875 - protein, 25 aa, Artificial Sequence
  Cyclic GFR-binding peptide
  MOD_RES (6)..(7): Xaa is C or S
TVPKPXXAPTQLRPVQVRKIDDSSN

SEQ ID NO: 11876 - protein, 17 aa, Artificial Sequence
  Cyclic GFR-binding peptide
DLSNITIQIMIGKTPKI

SEQ ID NO: 11877 - protein, 15 aa, Artificial Sequence
  Cyclic GFR-binding peptide
  MOD_RES (2)..(2): Xaa is C or S
TXAPTKLRPVQVRKI

SEQ ID NO: 11878 - protein, 14 aa, Artificial Sequence
  Cyclic GFR-binding peptide
  MOD_RES (1)..(1): Xaa is C or S
XVPQDLRSVKIAKV

SEQ ID NO: 11879 - protein, 18 aa, Artificial Sequence
  Cyclic GFR-binding peptide
LEPLPVVYYEIVRKKPIF

SEQ ID NO: 11880 - protein, 27 aa, Artificial Sequence
  Cyclic GFR-binding peptide
  MOD_RES (6)..(7): Xaa is C or S
TVPKPXXAPTQLRSVKVAKVDDSSNVI

SEQ ID NO: 11881 - protein, 29 aa, Artificial Sequence
  Cyclic GFR-binding peptide
  MOD_RES (5)..(5): Xaa is C or S
SSVKXQPSRVHHEPLPVVYYEYVRKKPKL

SEQ ID NO: 11882 - protein, 13 aa, Artificial Sequence
  Cyclic GFR-binding peptide
VPQALSNITIQIM

SEQ ID NO: 11883 - protein, 21 aa, Artificial Sequence
  Cyclic GFR-binding peptide
QVQLEPLPVVYYEIVRKKPIF

SEQ ID NO: 11884 - protein, 14 aa, Artificial Sequence
  Cyclic GFR-binding peptide
  MOD_RES (1)..(1): Xaa is C or S
XAPTQLRPVQVRKI

SEQ ID NO: 11885 - protein, 20 aa, Artificial Sequence
  Cyclic GFR-binding peptide
VHHEPLTVLYYEYVRKKPKL

SEQ ID NO: 11886 - protein, 19 aa, Artificial Sequence
  Cyclic GFR-binding peptide
  MOD_RES (5)..(6): Xaa is C or S
SAAPXXVPQALRPVQIRKI

SEQ ID NO: 11887 - protein, 15 aa, Artificial Sequence
  Cyclic GFR-binding peptide
RPVQMRKIDEYDKVV

SEQ ID NO: 11888 - protein, 23 aa, Artificial Sequence
  Cyclic GFR-binding peptide
  MOD_RES (6)..(7): Xaa is C or S
KIPKAXXVPTELSNITMQIMDEN

SEQ ID NO: 11889 - protein, 16 aa, Artificial Sequence
  Cyclic GFR-binding peptide
LRSVKIAKVIGKTPKI

SEQ ID NO: 11890 - protein, 26 aa, Artificial Sequence
  Cyclic GFR-binding peptide
  MOD_RES (6)..(7): Xaa is C or S
TVPKPXXAPTQLSNITVQIMDDSSNV

SEQ ID NO: 11891 - protein, 23 aa, Artificial Sequence
  Cyclic GFR-binding peptide
  MOD_RES (5)..(5): Xaa is C or S
RNVQXRPTQVQLEPLTVLYYEIV

SEQ ID NO: 11892 - protein, 17 aa, Artificial Sequence
  Cyclic GFR-binding peptide
EPLPVVYYEYVRKKPKL

SEQ ID NO: 11893 - protein, 21 aa, Artificial Sequence
  Cyclic GFR-binding peptide
  MOD_RES (7)..(7): Xaa is C or S
NDEGLEXVPTEEEPLPMVYYR

SEQ ID NO: 11894 - protein, 21 aa, Artificial Sequence
  Cyclic GFR-binding peptide
  MOD_RES (6)..(7): Xaa is C or S
TVPKPXXAPTQLRPVQVRKID

SEQ ID NO: 11895 - protein, 20 aa, Artificial Sequence
  Cyclic GFR-binding peptide
  MOD_RES (6)..(7): Xaa is C or S
SIPKAXXVPTELRPVQMRKI

SEQ ID NO: 11896 - protein, 19 aa, Artificial Sequence
  Cyclic GFR-binding peptide
HHEPLPVVYYEYVRKKPKL

SEQ ID NO: 11897 - protein, 15 aa, Artificial Sequence
  Cyclic GFR-binding peptide
RSVKIAKVVGRTPKV

SEQ ID NO: 11898 - protein, 22 aa, Artificial Sequence
  Cyclic GFR-binding peptide
  MOD_RES (7)..(7): Xaa is C or S
NDEGLEXVPTEEEPLPMVYYRI

SEQ ID NO: 11899 - protein, 22 aa, Artificial Sequence
  Cyclic GFR-binding peptide
  MOD_RES (6)..(7): Xaa is C or S
TVPKPXXAPTQLRPVQVRKIDD

SEQ ID NO: 11900 - protein, 15 aa, Artificial Sequence
  Cyclic GFR-binding peptide
RSVKVAKVDDSSNVI

SEQ ID NO: 11901 - protein, 25 aa, Artificial Sequence
  Cyclic GFR-binding peptide
  MOD_RES (6)..(7): Xaa is C or S
KIPKAXXVPTELRPVQMRKIDENEK

SEQ ID NO: 11902 - protein, 21 aa, Artificial Sequence
  Cyclic GFR-binding peptide
  MOD_RES (6)..(7): Xaa is C or S
SIPKAXXVPTELRPVQMRKID

SEQ ID NO: 11903 - protein, 15 aa, Artificial Sequence
  Cyclic GFR-binding peptide
  MOD_RES (1)..(2): Xaa is C or S
XXAPTKLRPVQVRKI

SEQ ID NO: 11904 - protein, 18 aa, Artificial Sequence
  Cyclic GFR-binding peptide
QALRPVQIRKIVGRKPKV

SEQ ID NO: 11905 - protein, 19 aa, Artificial Sequence
  Cyclic GFR-binding peptide
  MOD_RES (6)..(6): Xaa is C or S
VTKPTXAPTKLSNITVQIM

SEQ ID NO: 11906 - protein, 23 aa, Artificial Sequence
  Cyclic GFR-binding peptide
  MOD_RES (7)..(7): Xaa is C or S
HVTKPTXAPTKLSNITVQIMDDS

SEQ ID NO: 11907 - protein, 19 aa, Artificial Sequence
  Cyclic GFR-binding peptide
PQDLSNITIQIMVGRTPKV

SEQ ID NO: 11908 - protein, 25 aa, Artificial Sequence
  Cyclic GFR-binding peptide
  MOD_RES (6)..(7): Xaa is C or S
ASASPXXVPQDLRPVQIRKIVGRTP

SEQ ID NO: 11909 - protein, 24 aa, Artificial Sequence
  Cyclic GFR-binding peptide
  MOD_RES (6)..(7): Xaa is C or S
TVPKPXXAPTQLRSVKVAKVDDSS

SEQ ID NO: 11910 - protein, 22 aa, Artificial Sequence
  Cyclic GFR-binding peptide
  MOD_RES (6)..(7): Xaa is C or S
TVPKPXXAPTQLRSVKVAKVDD

SEQ ID NO: 11911 - protein, 18 aa, Artificial Sequence
  Cyclic GFR-binding peptide
  MOD_RES (4)..(5): Xaa is C or S
PKAXXVPTELRPVQMRKI

SEQ ID NO: 11912 - protein, 21 aa, Artificial Sequence
  Cyclic GFR-binding peptide
  MOD_RES (6)..(7): Xaa is C or S
YVPKPXXAPTKLSNITVQIMD

SEQ ID NO: 11913 - protein, 20 aa, Artificial Sequence
  Cyclic GFR-binding peptide
TEEEPLTMLYYRIKPHQGQH

SEQ ID NO: 11914 - protein, 20 aa, Artificial Sequence
  Cyclic GFR-binding peptide
  MOD_RES (6)..(7): Xaa is C or S
KIPKAXXVPTELSNITMQIM

SEQ ID NO: 11915 - protein, 18 aa, Artificial Sequence
  Cyclic GFR-binding peptide
  MOD_RES (4)..(5): Xaa is C or S
ASPXXVSQDLRPVQIRKI

SEQ ID NO: 11916 - protein, 15 aa, Artificial Sequence
  Cyclic GFR-binding peptide
  MOD_RES (1)..(2): Xaa is C or S
XXAPTKLSNITVQIM

SEQ ID NO: 11917 - protein, 20 aa, Artificial Sequence
  Cyclic GFR-binding peptide
  MOD_RES (6)..(7): Xaa is C or S
ASASPXXVSQDLRPVQIRKI

SEQ ID NO: 11918 - protein, 13 aa, Artificial Sequence
  Cyclic GFR-binding peptide
VPQDLSNITIQIM

SEQ ID NO: 11919 - protein, 20 aa, Artificial Sequence
  Cyclic GFR-binding peptide
  MOD_RES (5)..(5): Xaa is C or S
RNVQXRPTQVQLEPLPVVYY

SEQ ID NO: 11920 - protein, 19 aa, Artificial Sequence
  Cyclic GFR-binding peptide
  MOD_RES (5)..(6): Xaa is C or S
VPKPXXAPTKLRPVQVRKI

SEQ ID NO: 11921 - protein, 22 aa, Artificial Sequence
  Cyclic GFR-binding peptide
  MOD_RES (6)..(7): Xaa is C or S
TVPKPXXAPTQLSNITVQIMDD

SEQ ID NO: 11922 - protein, 17 aa, Artificial Sequence
  Cyclic GFR-binding peptide
ALRSVKIAKVVGRKPKV

SEQ ID NO: 11923 - protein, 17 aa, Artificial Sequence
  Cyclic GFR-binding peptide
  MOD_RES (4)..(4): Xaa is C or S
KPTXAPTKLRSVKVAKV

SEQ ID NO: 11924 - protein, 23 aa, Artificial Sequence
  Cyclic GFR-binding peptide
  MOD_RES (7)..(7): Xaa is C or S
NDEGLEXVPTEEEPLPMVYYRIK

SEQ ID NO: 11925 - protein, 22 aa, Artificial Sequence
  Cyclic GFR-binding peptide
  MOD_RES (6)..(7): Xaa is C or S
ASASPXXVPQDLSNITIQIMVG

SEQ ID NO: 11926 - protein, 21 aa, Artificial Sequence
  Cyclic GFR-binding peptide
  MOD_RES (6)..(7): Xaa is C or S
SIPKAXXVPTELRSVKMAKVD

SEQ ID NO: 11927 - protein, 20 aa, Artificial Sequence
  Cyclic GFR-binding peptide
  MOD_RES (6)..(7): Xaa is C or S
KIPKAXXVPTELRPVQMRKI

SEQ ID NO: 11928 - protein, 18 aa, Artificial Sequence
  Cyclic GFR-binding peptide
  MOD_RES (4)..(5): Xaa is C or S
ASPXXVSQDLSNITIQIM

SEQ ID NO: 11929 - protein, 26 aa, Artificial Sequence
  Cyclic GFR-binding peptide
  MOD_RES (6)..(7): Xaa is C or S
KIPKAXXVPTELRSVKMAKVDENEKV

SEQ ID NO: 11930 - protein, 24 aa, Artificial Sequence
  Cyclic GFR-binding peptide
  MOD_RES (6)..(7): Xaa is C or S
TVPKPXXAPTQLSNITVQIMDDSS

SEQ ID NO: 11931 - protein, 26 aa, Artificial Sequence
  Cyclic GFR-binding peptide
  MOD_RES (5)..(5): Xaa is C or S
SSVKXQPSRVHHEPLTVLYYEYVRKK

SEQ ID NO: 11932 - protein, 17 aa, Artificial Sequence
  Cyclic GFR-binding peptide
  MOD_RES (3)..(4): Xaa is C or S
KAXXVPTELRPVQMRKI

SEQ ID NO: 11933 - protein, 15 aa, Artificial Sequence
  Cyclic GFR-binding peptide
  MOD_RES (2)..(2): Xaa is C or S
EXVPTEEEPLPMVYY

SEQ ID NO: 11934 - protein, 21 aa, Artificial Sequence
  Cyclic GFR-binding peptide
  MOD_RES (6)..(7): Xaa is C or S
ASASPXXVSQDLRPVQIRKII

SEQ ID NO: 11935 - protein, 21 aa, Artificial Sequence
  Cyclic GFR-binding peptide
  MOD_RES (6)..(7): Xaa is C or S
TVPKPXXAPTQLRSVKVAKVD

SEQ ID NO: 11936 - protein, 21 aa, Artificial Sequence
  Cyclic GFR-binding peptide
  MOD_RES (6)..(7): Xaa is C or S
ASASPXXVPQDLRSVKIAKVV

SEQ ID NO: 11937 - protein, 17 aa, Artificial Sequence
  Cyclic GFR-binding peptide
  MOD_RES (2)..(2): Xaa is C or S
KXQPSRVHHEPLTVLYY

SEQ ID NO: 11938 - protein, 25 aa, Artificial Sequence
  Cyclic GFR-binding peptide
  MOD_RES (5)..(5): Xaa is C or S
SSVKXQPSRVHHEPLTVLYYEYVRK

SEQ ID NO: 11939 - protein, 17 aa, Artificial Sequence
  Cyclic GFR-binding peptide
ELRSVKMAKVDENEKVV

SEQ ID NO: 11940 - protein, 17 aa, Artificial Sequence
  Cyclic GFR-binding peptide
EPLTVLYYEIVRKKPIF

SEQ ID NO: 11941 - protein, 15 aa, Artificial Sequence
  Cyclic GFR-binding peptide
  MOD_RES (1)..(2): Xaa is C or S
XXAPTQLRPVQVRKI

SEQ ID NO: 11942 - protein, 19 aa, Artificial Sequence
  Cyclic GFR-binding peptide
PQALRSVKIAKVVGRKPKV

SEQ ID NO: 11943 - protein, 13 aa, Artificial Sequence
  Cyclic GFR-binding peptide
VPTELRSVKMAKV

SEQ ID NO: 11944 - protein, 27 aa, Artificial Sequence
  Cyclic GFR-binding peptide
  MOD_RES (6)..(7): Xaa is C or S
KIPKAXXVPTELSNITMQIMDENEKVV

SEQ ID NO: 11945 - protein, 22 aa, Artificial Sequence
  Cyclic GFR-binding peptide
  MOD_RES (6)..(7): Xaa is C or S
ASASPXXVSQDLRPVQIRKIIG

SEQ ID NO: 11946 - protein, 27 aa, Artificial Sequence
  Cyclic GFR-binding peptide
  MOD_RES (5)..(5): Xaa is C or S
SSVKXQPSRVHHEPLPVVYYEYVRKKP

SEQ ID NO: 11947 - protein, 19 aa, Artificial Sequence
  Cyclic GFR-binding peptide
  MOD_RES (4)..(4): Xaa is C or S
SVKXQPSRVHHEPLTVLYY

SEQ ID NO: 11948 - protein, 19 aa, Artificial Sequence
  Cyclic GFR-binding peptide
PTELSNITMQIMDENEKVV

SEQ ID NO: 11949 - protein, 17 aa, Artificial Sequence
  Cyclic GFR-binding peptide
DLSNITIQIMVGRTPKV

SEQ ID NO: 11950 - protein, 16 aa, Artificial Sequence
  Cyclic GFR-binding peptide
  MOD_RES (2)..(3): Xaa is C or S
PXXAPTQLSNITVQIM

SEQ ID NO: 11951 - protein, 20 aa, Artificial Sequence
  Cyclic GFR-binding peptide
  MOD_RES (7)..(7): Xaa is C or S
HVTKPTXAPTKLSNITVQIM

SEQ ID NO: 11952 - protein, 14 aa, Artificial Sequence
  Cyclic GFR-binding peptide
  MOD_RES (1)..(1): Xaa is C or S
XAPTKLRPVQVRKI

SEQ ID NO: 11953 - protein, 17 aa, Artificial Sequence
  Cyclic GFR-binding peptide
QLSNITVQIMDDSSNVI

SEQ ID NO: 11954 - protein, 17 aa, Artificial Sequence
  Cyclic GFR-binding peptide
EPLPMVYYRIKPHQGQH

SEQ ID NO: 11955 - protein, 15 aa, Artificial Sequence
  Cyclic GFR-binding peptide
RSVKIAKVIGKTPKI

SEQ ID NO: 11956 - protein, 26 aa, Artificial Sequence
  Cyclic GFR-binding peptide
  MOD_RES (7)..(7): Xaa is C or S
NDEGLEXVPTEEEPLPMVYYRIKPHQ

SEQ ID NO: 11957 - protein, 15 aa, Artificial Sequence
  Cyclic GFR-binding peptide
  MOD_RES (2)..(2): Xaa is C or S
TXAPTKLRSVKVAKV

SEQ ID NO: 11958 - protein, 26 aa, Artificial Sequence
  Cyclic GFR-binding peptide
  MOD_RES (7)..(7): Xaa is C or S
HVTKPTXAPTKLSNITVQIMDDSSNV

SEQ ID NO: 11959 - protein, 22 aa, Artificial Sequence
  Cyclic GFR-binding peptide
  MOD_RES (6)..(7): Xaa is C or S
ASASPXXVSQDLRSVKIAKVIG

SEQ ID NO: 11960 - protein, 26 aa, Artificial Sequence
  Cyclic GFR-binding peptide
  MOD_RES (6)..(7): Xaa is C or S
YVPKPXXAPTKLSNITVQIMDDSSNV

SEQ ID NO: 11961 - protein, 24 aa, Artificial Sequence
  Cyclic GFR-binding peptide
  MOD_RES (6)..(7): Xaa is C or S
SIPKAXXVPTELRSVKMAKVDEYD

SEQ ID NO: 11962 - protein, 19 aa, Artificial Sequence
  Cyclic GFR-binding peptide
  MOD_RES (6)..(6): Xaa is C or S
VTKPTXAPTKLRPVQVRKI

SEQ ID NO: 11963 - protein, 20 aa, Artificial Sequence
  Cyclic GFR-binding peptide
  MOD_RES (6)..(7): Xaa is C or S
ASAAPXXVPQALSNITIQIM

SEQ ID NO: 11964 - protein, 16 aa, Artificial Sequence
  Cyclic GFR-binding peptide
  MOD_RES (2)..(3): Xaa is C or S
PXXVSQDLRSVKIAKV

SEQ ID NO: 11965 - protein, 23 aa, Artificial Sequence
  Cyclic GFR-binding peptide
  MOD_RES (6)..(7): Xaa is C or S
ASAAPXXVPQALRSVKIAKVVGR

SEQ ID NO: 11966 - protein, 18 aa, Artificial Sequence
  Cyclic GFR-binding peptide
QDLRPVQIRKIIGKTPKI

SEQ ID NO: 11967 - protein, 17 aa, Artificial Sequence
  Cyclic GFR-binding peptide
KLSNITVQIMDDSSNVI

SEQ ID NO: 11968 - protein, 22 aa, Artificial Sequence
  Cyclic GFR-binding peptide
  MOD_RES (7)..(7): Xaa is C or S
NDEGLEXVPTEEEPLTMLYYRI

SEQ ID NO: 11969 - protein, 27 aa, Artificial Sequence
  Cyclic GFR-binding peptide
  MOD_RES (7)..(7): Xaa is C or S
NDEGLEXVPTEEEPLTMLYYRIKPHQG

SEQ ID NO: 11970 - protein, 24 aa, Artificial Sequence
  Cyclic GFR-binding peptide
  MOD_RES (6)..(7): Xaa is C or S
ASAAPXXVPQALRPVQIRKIVGRK

SEQ ID NO: 11971 - protein, 20 aa, Artificial Sequence
  Cyclic GFR-binding peptide
  MOD_RES (7)..(7): Xaa is C or S
HVTKPTXAPTKLRSVKVAKV

SEQ ID NO: 11972 - protein, 13 aa, Artificial Sequence
  Cyclic GFR-binding peptide
APTKLRSVKVAKV

SEQ ID NO: 11973 - protein, 16 aa, Artificial Sequence
  Cyclic GFR-binding peptide
LRPVQMRKIDENEKVV

SEQ ID NO: 11974 - protein, 25 aa, Artificial Sequence
  Cyclic GFR-binding peptide
  MOD_RES (6)..(7): Xaa is C or S
ASAAPXXVPQALRSVKIAKVVGRKP

SEQ ID NO: 11975 - protein, 26 aa, Artificial Sequence
  Cyclic GFR-binding peptide
  MOD_RES (6)..(7): Xaa is C or S
ASASPXXVPQDLRSVKIAKVVGRTPK

SEQ ID NO: 11976 - protein, 15 aa, Artificial Sequence
  Cyclic GFR-binding peptide
RPTQVQLEPLTVLYY

SEQ ID NO: 11977 - protein, 25 aa, Artificial Sequence
  Cyclic GFR-binding peptide
  MOD_RES (6)..(7): Xaa is C or S
ASAAPXXVPQALSNITIQIMVGRKP

SEQ ID NO: 11978 - protein, 18 aa, Artificial Sequence
  Cyclic GFR-binding peptide
  MOD_RES (4)..(5): Xaa is C or S
PKPXXAPTQLSNITVQIM

SEQ ID NO: 11979 - protein, 25 aa, Artificial Sequence
  Cyclic GFR-binding peptide
  MOD_RES (6)..(7): Xaa is C or S
YVPKPXXAPTKLRPVQVRKIDDSSN

SEQ ID NO: 11980 - protein, 22 aa, Artificial Sequence
  Cyclic GFR-binding peptide
  MOD_RES (5)..(5): Xaa is C or S
RNVQXRPTQVQLEPLTVLYYEI

SEQ ID NO: 11981 - protein, 20 aa, Artificial Sequence
  Cyclic GFR-binding peptide
VQLEPLTVLYYEIVRKKPIF

SEQ ID NO: 11982 - protein, 25 aa, Artificial Sequence
  Cyclic GFR-binding peptide
  MOD_RES (6)..(7): Xaa is C or S
KIPKAXXVPTELSNITMQIMDENEK

SEQ ID NO: 11983 - protein, 25 aa, Artificial Sequence
  Cyclic GFR-binding peptide
  MOD_RES (5)..(5): Xaa is C or S
RNVQXRPTQVQLEPLTVLYYEIVRK

SEQ ID NO: 11984 - protein, 27 aa, Artificial Sequence
  Cyclic GFR-binding peptide
  MOD_RES (6)..(7): Xaa is C or S
ASAAPXXVPQALRSVKIAKVVGRKPKV

SEQ ID NO: 11985 - protein, 24 aa, Artificial Sequence
  Cyclic GFR-binding peptide
  MOD_RES (6)..(7): Xaa is C or S
YVPKPXXAPTKLRPVQVRKIDDSS

SEQ ID NO: 11986 - protein, 17 aa, Artificial Sequence
  Cyclic GFR-binding peptide
  MOD_RES (3)..(4): Xaa is C or S
KPXXAPTKLRPVQVRKI

SEQ ID NO: 11987 - protein, 17 aa, Artificial Sequence
  Cyclic GFR-binding peptide
  MOD_RES (2)..(2): Xaa is C or S
KXQPSRVHHEPLPVVYY

SEQ ID NO: 11988 - protein, 20 aa, Artificial Sequence
  Cyclic GFR-binding peptide
  MOD_RES (6)..(7): Xaa is C or S
ASASPXXVPQDLRPVQIRKI

SEQ ID NO: 11989 - protein, 15 aa, Artificial Sequence
  Cyclic GFR-binding peptide
RSVKIAKVVGRKPKV

SEQ ID NO: 11990 - protein, 16 aa, Artificial Sequence
  Cyclic GFR-binding peptide
  MOD_RES (2)..(3): Xaa is C or S
PXXVPQALRSVKIAKV

SEQ ID NO: 11991 - protein, 17 aa, Artificial Sequence
  Cyclic GFR-binding peptide
  MOD_RES (3)..(4): Xaa is C or S
KAXXVPTELSNITMQIM

SEQ ID NO: 11992 - protein, 20 aa, Artificial Sequence
  Cyclic GFR-binding peptide
  MOD_RES (6)..(7): Xaa is C or S
ASAAPXXVPQALRPVQIRKI

SEQ ID NO: 11993 - protein, 23 aa, Artificial Sequence
  Cyclic GFR-binding peptide
  MOD_RES (6)..(7): Xaa is C or S
ASAAPXXVPQALSNITIQIMVGR

SEQ ID NO: 11994 - protein, 15 aa, Artificial Sequence
  Cyclic GFR-binding peptide
  MOD_RES (1)..(2): Xaa is C or S
XXAPTKLRSVKVAKV

SEQ ID NO: 11995 - protein, 18 aa, Artificial Sequence
  Cyclic GFR-binding peptide
TELRPVQMRKIDEYDKVV

SEQ ID NO: 11996 - protein, 19 aa, Artificial Sequence
  Cyclic GFR-binding peptide
EEEPLTMLYYRIKPHQGQH

SEQ ID NO: 11997 - protein, 22 aa, Artificial Sequence
  Cyclic GFR-binding peptide
  MOD_RES (6)..(7): Xaa is C or S
SIPKAXXVPTELRSVKMAKVDE

SEQ ID NO: 11998 - protein, 22 aa, Artificial Sequence
  Cyclic GFR-binding peptide
  MOD_RES (7)..(7): Xaa is C or S
HVTKPTXAPTKLRSVKVAKVDD

SEQ ID NO: 11999 - protein, 16 aa, Artificial Sequence
  Cyclic GFR-binding peptide
LSNITVQIMDDSSNVI

SEQ ID NO: 12000 - protein, 27 aa, Artificial Sequence
  Cyclic GFR-binding peptide
  MOD_RES (6)..(7): Xaa is C or S
ASAAPXXVPQALSNITIQIMVGRKPKV

SEQ ID NO: 12001 - protein, 27 aa, Artificial Sequence
  Cyclic GFR-binding peptide
  MOD_RES (6)..(7): Xaa is C or S
ASASPXXVSQDLRPVQIRKIIGKTPKI

SEQ ID NO: 12002 - protein, 19 aa, Artificial Sequence
  Cyclic GFR-binding peptide
PTELRPVQMRKIDEYDKVV

SEQ ID NO: 12003 - protein, 21 aa, Artificial Sequence
  Cyclic GFR-binding peptide
  MOD_RES (6)..(7): Xaa is C or S
ASASPXXVPQDLRPVQIRKIV

SEQ ID NO: 12004 - protein, 29 aa, Artificial Sequence
  Cyclic GFR-binding peptide
  MOD_RES (5)..(5): Xaa is C or S
SSVKXQPSRVHHEPLTVLYYEYVRKKPKL

SEQ ID NO: 12005 - protein, 20 aa, Artificial Sequence
  Cyclic GFR-binding peptide
  MOD_RES (7)..(7): Xaa is C or S
NDEGLEXVPTEEEPLTMLYY

SEQ ID NO: 12006 - protein, 28 aa, Artificial Sequence
  Cyclic GFR-binding peptide
  MOD_RES (7)..(7): Xaa is C or S
NDEGLEXVPTEEEPLTMLYYRIKPHQGQ

SEQ ID NO: 12007 - protein, 26 aa, Artificial Sequence
  Cyclic GFR-binding peptide
  MOD_RES (6)..(7): Xaa is C or S
ASASPXXVSQDLRSVKIAKVIGKTPK

SEQ ID NO: 12008 - protein, 14 aa, Artificial Sequence
  Cyclic GFR-binding peptide
  MOD_RES (1)..(1): Xaa is C or S
XAPTKLSNITVQIM

SEQ ID NO: 12009 - protein, 16 aa, Artificial Sequence
  Cyclic GFR-binding peptide
LRSVKVAKVDDSSNVI

SEQ ID NO: 12010 - protein, 16 aa, Artificial Sequence
  Cyclic GFR-binding peptide
  MOD_RES (1)..(1): Xaa is C or S
XRPTQVQLEPLPVVYY

SEQ ID NO: 12011 - protein, 17 aa, Artificial Sequence
  Cyclic GFR-binding peptide
KLRSVKVAKVDDSSNVI

SEQ ID NO: 12012 - protein, 17 aa, Artificial Sequence
  Cyclic GFR-binding peptide
QLRSVKVAKVDDSSNVI

SEQ ID NO: 12013 - protein, 20 aa, Artificial Sequence
  Cyclic GFR-binding peptide
  MOD_RES (6)..(7): Xaa is C or S
KIPKAXXVPTELRSVKMAKV

SEQ ID NO: 12014 - protein, 18 aa, Artificial Sequence
  Cyclic GFR-binding peptide
TELRSVKMAKVDENEKVV

SEQ ID NO: 12015 - protein, 21 aa, Artificial Sequence
  Cyclic GFR-binding peptide
RVHHEPLPVVYYEYVRKKPKL

SEQ ID NO: 12016 - protein, 19 aa, Artificial Sequence
  Cyclic GFR-binding peptide
  MOD_RES (6)..(6): Xaa is C or S
DEGLEXVPTEEEPLTMLYY

SEQ ID NO: 12017 - protein, 16 aa, Artificial Sequence
  Cyclic GFR-binding peptide
  MOD_RES (2)..(3): Xaa is C or S
PXXVPQDLRSVKIAKV

SEQ ID NO: 12018 - protein, 14 aa, Artificial Sequence
  Cyclic GFR-binding peptide
PTQVQLEPLPVVYY

SEQ ID NO: 12019 - protein, 25 aa, Artificial Sequence
  Cyclic GFR-binding peptide
  MOD_RES (6)..(7): Xaa is C or S
YVPKPXXAPTKLRSVKVAKVDDSSN

SEQ ID NO: 12020 - protein, 18 aa, Artificial Sequence
  Cyclic GFR-binding peptide
  MOD_RES (3)..(3): Xaa is C or S
VKXQPSRVHHEPLPVVYY

SEQ ID NO: 12021 - protein, 21 aa, Artificial Sequence
  Cyclic GFR-binding peptide
  MOD_RES (5)..(5): Xaa is C or S
RNVQXRPTQVQLEPLPVVYYE

SEQ ID NO: 12022 - protein, 16 aa, Artificial Sequence
  Cyclic GFR-binding peptide
  MOD_RES (1)..(1): Xaa is C or S
XQPSRVHHEPLPVVYY

SEQ ID NO: 12023 - protein, 19 aa, Artificial Sequence
  Cyclic GFR-binding peptide
  MOD_RES (5)..(6): Xaa is C or S
SASPXXVSQDLSNITIQIM

SEQ ID NO: 12024 - protein, 19 aa, Artificial Sequence
  Cyclic GFR-binding peptide
SQDLSNITIQIMIGKTPKI

SEQ ID NO: 12025 - protein, 27 aa, Artificial Sequence
  Cyclic GFR-binding peptide
  MOD_RES (6)..(7): Xaa is C or S
SIPKAXXVPTELSNITMQIMDEYDKVV

SEQ ID NO: 12026 - protein, 18 aa, Artificial Sequence
  Cyclic GFR-binding peptide
TELSNITMQIMDENEKVV

SEQ ID NO: 12027 - protein, 25 aa, Artificial Sequence
  Cyclic GFR-binding peptide
  MOD_RES (6)..(7): Xaa is C or S
ASAAPXXVPQALRPVQIRKIVGRKP

SEQ ID NO: 12028 - protein, 25 aa, Artificial Sequence
  Cyclic GFR-binding peptide
  MOD_RES (6)..(7): Xaa is C or S
YVPKPXXAPTKLSNITVQIMDDSSN

SEQ ID NO: 12029 - protein, 15 aa, Artificial Sequence
  Cyclic GFR-binding peptide
SNITIQIMVGRKPKV

SEQ ID NO: 12030 - protein, 26 aa, Artificial Sequence
  Cyclic GFR-binding peptide
  MOD_RES (5)..(5): Xaa is C or S
SSVKXQPSRVHHEPLPVVYYEYVRKK

SEQ ID NO: 12031 - protein, 18 aa, Artificial Sequence
  Cyclic GFR-binding peptide
  MOD_RES (5)..(5): Xaa is C or S
EGLEXVPTEEEPLTMLYY

SEQ ID NO: 12032 - protein, 18 aa, Artificial Sequence
  Cyclic GFR-binding peptide
  MOD_RES (4)..(5): Xaa is C or S
PKPXXAPTKLRSVKVAKV

SEQ ID NO: 12033 - protein, 15 aa, Artificial Sequence
  Cyclic GFR-binding peptide
QPSRVHHEPLTVLYY

SEQ ID NO: 12034 - protein, 22 aa, Artificial Sequence
  Cyclic GFR-binding peptide
  MOD_RES (5)..(5): Xaa is C or S
RNVQXRPTQVQLEPLPVVYYEI

SEQ ID NO: 12035 - protein, 17 aa, Artificial Sequence
  Cyclic GFR-binding peptide
ELRPVQMRKIDENEKVV

SEQ ID NO: 12036 - protein, 24 aa, Artificial Sequence
  Cyclic GFR-binding peptide
  MOD_RES (6)..(7): Xaa is C or S
SIPKAXXVPTELSNITMQIMDEYD

SEQ ID NO: 12037 - protein, 24 aa, Artificial Sequence
  Cyclic GFR-binding peptide
  MOD_RES (6)..(7): Xaa is C or S
ASASPXXVSQDLSNITIQIMIGKT

SEQ ID NO: 12038 - protein, 29 aa, Artificial Sequence
  Cyclic GFR-binding peptide
  MOD_RES (7)..(7): Xaa is C or S
NDEGLEXVPTEEEPLTMLYYRIKPHQGQH

SEQ ID NO: 12039 - protein, 23 aa, Artificial Sequence
  Cyclic GFR-binding peptide
  MOD_RES (6)..(7): Xaa is C or S
ASASPXXVPQDLSNITIQIMVGR

SEQ ID NO: 12040 - protein, 20 aa, Artificial Sequence
  Cyclic GFR-binding peptide
  MOD_RES (6)..(7): Xaa is C or S
TVPKPXXAPTQLSNITVQIM

SEQ ID NO: 12041 - protein, 24 aa, Artificial Sequence
  Cyclic GFR-binding peptide
  MOD_RES (6)..(7): Xaa is C or S
TVPKPXXAPTQLRPVQVRKIDDSS

SEQ ID NO: 12042 - protein, 19 aa, Artificial Sequence
  Cyclic GFR-binding peptide
SQDLRSVKIAKVIGKTPKI

SEQ ID NO: 12043 - protein, 26 aa, Artificial Sequence
  Cyclic GFR-binding peptide
  MOD_RES (6)..(7): Xaa is C or S
ASAAPXXVPQALRPVQIRKIVGRKPK

SEQ ID NO: 12044 - protein, 20 aa, Artificial Sequence
  Cyclic GFR-binding peptide
  MOD_RES (7)..(7): Xaa is C or S
NDEGLEXVPTEEEPLPMVYY

SEQ ID NO: 12045 - protein, 23 aa, Artificial Sequence
  Cyclic GFR-binding peptide
  MOD_RES (6)..(7): Xaa is C or S
ASASPXXVSQDLSNITIQIMIGK

SEQ ID NO: 12046 - protein, 18 aa, Artificial Sequence
  Cyclic GFR-binding peptide
  MOD_RES (5)..(5): Xaa is C or S
EGLEXVPTEEEPLPMVYY

SEQ ID NO: 12047 - protein, 14 aa, Artificial Sequence
  Cyclic GFR-binding peptide
PSRVHHEPLTVLYY

SEQ ID NO: 12048 - protein, 15 aa, Artificial Sequence
  Cyclic GFR-binding peptide
QPSRVHHEPLPVVYY

SEQ ID NO: 12049 - protein, 16 aa, Artificial Sequence
  Cyclic GFR-binding peptide
  MOD_RES (2)..(3): Xaa is C or S
PXXAPTQLRSVKVAKV

SEQ ID NO: 12050 - protein, 25 aa, Artificial Sequence
  Cyclic GFR-binding peptide
  MOD_RES (5)..(5): Xaa is C or S
RNVQXRPTQVQLEPLPVVYYEIVRK

SEQ ID NO: 12051 - protein, 23 aa, Artificial Sequence
  Cyclic GFR-binding peptide
  MOD_RES (6)..(7): Xaa is C or S
TVPKPXXAPTQLRSVKVAKVDDS

SEQ ID NO: 12052 - protein, 24 aa, Artificial Sequence
  Cyclic GFR-binding peptide
  MOD_RES (6)..(7): Xaa is C or S
ASASPXXVPQDLRPVQIRKIVGRT

SEQ ID NO: 12053 - protein, 18 aa, Artificial Sequence
  Cyclic GFR-binding peptide
  MOD_RES (3)..(3): Xaa is C or S
VKXQPSRVHHEPLTVLYY

SEQ ID NO: 12054 - protein, 20 aa, Artificial Sequence
  Cyclic GFR-binding peptide
  MOD_RES (5)..(5): Xaa is C or S
SSVKXQPSRVHHEPLPVVYY

SEQ ID NO: 12055 - protein, 27 aa, Artificial Sequence
  Cyclic GFR-binding peptide
  MOD_RES (5)..(5): Xaa is C or S
SSVKXQPSRVHHEPLTVLYYEYVRKKP

SEQ ID NO: 12056 - protein, 16 aa, Artificial Sequence
  Cyclic GFR-binding peptide
  MOD_RES (2)..(3): Xaa is C or S
PXXVPQDLRPVQIRKI

SEQ ID NO: 12057 - protein, 28 aa, Artificial Sequence
  Cyclic GFR-binding peptide
  MOD_RES (5)..(5): Xaa is C or S
RNVQXRPTQVQLEPLTVLYYEIVRKKPI

SEQ ID NO: 12058 - protein, 20 aa, Artificial Sequence
  Cyclic GFR-binding peptide
VQLEPLPVVYYEIVRKKPIF

SEQ ID NO: 12059 - protein, 21 aa, Artificial Sequence
  Cyclic GFR-binding peptide
  MOD_RES (7)..(7): Xaa is C or S
HVTKPTXAPTKLRSVKVAKVD

SEQ ID NO: 12060 - protein, 20 aa, Artificial Sequence
  Cyclic GFR-binding peptide
  MOD_RES (6)..(7): Xaa is C or S
ASASPXXVPQDLSNITIQIM

SEQ ID NO: 12061 - protein, 23 aa, Artificial Sequence
  Cyclic GFR-binding peptide
  MOD_RES (6)..(7): Xaa is C or S
SIPKAXXVPTELRPVQMRKIDEY

SEQ ID NO: 12062 - protein, 15 aa, Artificial Sequence
  Cyclic GFR-binding peptide
SNITIQIMIGKTPKI

SEQ ID NO: 12063 - protein, 19 aa, Artificial Sequence
  Cyclic GFR-binding peptide
  MOD_RES (6)..(6): Xaa is C or S
DEGLEXVPTEEEPLPMVYY

SEQ ID NO: 12064 - protein, 24 aa, Artificial Sequence
  Cyclic GFR-binding peptide
  MOD_RES (6)..(7): Xaa is C or S
ASASPXXVSQDLRSVKIAKVIGKT

SEQ ID NO: 12065 - protein, 21 aa, Artificial Sequence
  Cyclic GFR-binding peptide
  MOD_RES (7)..(7): Xaa is C or S
NDEGLEXVPTEEEPLTMLYYR

SEQ ID NO: 12066 - protein, 18 aa, Artificial Sequence
  Cyclic GFR-binding peptide
  MOD_RES (4)..(5): Xaa is C or S
AAPXXVPQALRSVKIAKV

SEQ ID NO: 12067 - protein, 13 aa, Artificial Sequence
  Cyclic GFR-binding peptide
SRVHHEPLPVVYY

SEQ ID NO: 12068 - protein, 19 aa, Artificial Sequence
  Cyclic GFR-binding peptide
PQALRPVQIRKIVGRKPKV

SEQ ID NO: 12069 - protein, 16 aa, Artificial Sequence
  Cyclic GFR-binding peptide
  MOD_RES (1)..(1): Xaa is C or S
XQPSRVHHEPLTVLYY

SEQ ID NO: 12070 - protein, 19 aa, Artificial Sequence
  Cyclic GFR-binding peptide
QLEPLPVVYYEIVRKKPIF

SEQ ID NO: 12071 - protein, 27 aa, Artificial Sequence
  Cyclic GFR-binding peptide
  MOD_RES (6)..(7): Xaa is C or S
KIPKAXXVPTELRSVKMAKVDENEKVV

SEQ ID NO: 12072 - protein, 27 aa, Artificial Sequence
  Cyclic GFR-binding peptide
  MOD_RES (6)..(7): Xaa is C or S
TVPKPXXAPTQLSNITVQIMDDSSNVI

SEQ ID NO: 12073 - protein, 16 aa, Artificial Sequence
  Cyclic GFR-binding peptide
  MOD_RES (2)..(3): Xaa is C or S
PXXVPQALRPVQIRKI

SEQ ID NO: 12074 - protein, 27 aa, Artificial Sequence
  Cyclic GFR-binding peptide
  MOD_RES (6)..(7): Xaa is C or S
ASASPXXVPQDLRSVKIAKVVGRTPKV

SEQ ID NO: 12075 - protein, 25 aa, Artificial Sequence
  Cyclic GFR-binding peptide
  MOD_RES (6)..(7): Xaa is C or S
ASASPXXVPQDLSNITIQIMVGRTP

SEQ ID NO: 12076 - protein, 17 aa, Artificial Sequence
  Cyclic GFR-binding peptide
ELSNITMQIMDEYDKVV

SEQ ID NO: 12077 - protein, 20 aa, Artificial Sequence
  Cyclic GFR-binding peptide
  MOD_RES (6)..(7): Xaa is C or S
ASASPXXVPQDLRSVKIAKV

SEQ ID NO: 12078 - protein, 19 aa, Artificial Sequence
  Cyclic GFR-binding peptide
  MOD_RES (5)..(6): Xaa is C or S
SASPXXVSQDLRPVQIRKI

SEQ ID NO: 12079 - protein, 23 aa, Artificial Sequence
  Cyclic GFR-binding peptide
  MOD_RES (5)..(5): Xaa is C or S
RNVQXRPTQVQLEPLPVVYYEIV

SEQ ID NO: 12080 - protein, 19 aa, Artificial Sequence
  Cyclic GFR-binding peptide
PTELRSVKMAKVDENEKVV

SEQ ID NO: 12081 - protein, 25 aa, Artificial Sequence
  Cyclic GFR-binding peptide
  MOD_RES (6)..(7): Xaa is C or S
TVPKPXXAPTQLSNITVQIMDDSSN

SEQ ID NO: 12082 - protein, 24 aa, Artificial Sequence
  Cyclic GFR-binding peptide
  MOD_RES (6)..(7): Xaa is C or S
SIPKAXXVPTELRPVQMRKIDEYD

SEQ ID NO: 12083 - protein, 19 aa, Artificial Sequence
  Cyclic GFR-binding peptide
PQALSNITIQIMVGRKPKV

SEQ ID NO: 12084 - protein, 23 aa, Artificial Sequence
  Cyclic GFR-binding peptide
  MOD_RES (6)..(7): Xaa is C or S
ASASPXXVSQDLRSVKIAKVIGK

SEQ ID NO: 12085 - protein, 13 aa, Artificial Sequence
  Cyclic GFR-binding peptide
APTQLRPVQVRKI

SEQ ID NO: 12086 - protein, 13 aa, Artificial Sequence
  Cyclic GFR-binding peptide
APTKLSNITVQIM

SEQ ID NO: 12087 - protein, 27 aa, Artificial Sequence
  Cyclic GFR-binding peptide
  MOD_RES (6)..(7): Xaa is C or S
KIPKAXXVPTELRPVQMRKIDENEKVV

SEQ ID NO: 12088 - protein, 15 aa, Artificial Sequence
  Cyclic GFR-binding peptide
  MOD_RES (1)..(2): Xaa is C or S
XXVPQALRPVQIRKI

SEQ ID NO: 12089 - protein, 14 aa, Artificial Sequence
  Cyclic GFR-binding peptide
  MOD_RES (1)..(1): Xaa is C or S
XVPTELRSVKMAKV

SEQ ID NO: 12090 - protein, 25 aa, Artificial Sequence
  Cyclic GFR-binding peptide
  MOD_RES (6)..(7): Xaa is C or S
TVPKPXXAPTQLRSVKVAKVDDSSN

SEQ ID NO: 12091 - protein, 14 aa, Artificial Sequence
  Cyclic GFR-binding peptide
  MOD_RES (1)..(1): Xaa is C or S
XVPQALSNITIQIM

SEQ ID NO: 12092 - protein, 17 aa, Artificial Sequence
  Cyclic GFR-binding peptide
DLRSVKIAKVIGKTPKI

SEQ ID NO: 12093 - protein, 24 aa, Artificial Sequence
  Cyclic GFR-binding peptide
  MOD_RES (6)..(7): Xaa is C or S
ASAAPXXVPQALRSVKIAKVVGRK

SEQ ID NO: 12094 - protein, 16 aa, Artificial Sequence
  Cyclic GFR-binding peptide
LSNITIQIMVGRKPKV

SEQ ID NO: 12095 - protein, 16 aa, Artificial Sequence
  Cyclic GFR-binding peptide
  MOD_RES (2)..(3): Xaa is C or S
PXXVSQDLSNITIQIM

SEQ ID NO: 12096 - protein, 18 aa, Artificial Sequence
  Cyclic GFR-binding peptide
  MOD_RES (4)..(5): Xaa is C or S
AAPXXVPQALRPVQIRKI

SEQ ID NO: 12097 - protein, 26 aa, Artificial Sequence
  Cyclic GFR-binding peptide
  MOD_RES (6)..(7): Xaa is C or S
SIPKAXXVPTELRPVQMRKIDEYDKV

SEQ ID NO: 12098 - protein, 16 aa, Artificial Sequence
  Cyclic GFR-binding peptide
  MOD_RES (2)..(3): Xaa is C or S
AXXVPTELSNITMQIM

SEQ ID NO: 12099 - protein, 21 aa, Artificial Sequence
  Cyclic GFR-binding peptide
  MOD_RES (6)..(7): Xaa is C or S
YVPKPXXAPTKLRSVKVAKVD

SEQ ID NO: 12100 - protein, 23 aa, Artificial Sequence
  Cyclic GFR-binding peptide
  MOD_RES (6)..(7): Xaa is C or S
ASASPXXVSQDLRPVQIRKIIGK

SEQ ID NO: 12101 - protein, 17 aa, Artificial Sequence
  Cyclic GFR-binding peptide
ALRPVQIRKIVGRKPKV

SEQ ID NO: 12102 - protein, 19 aa, Artificial Sequence
  Cyclic GFR-binding peptide
PTQLRSVKVAKVDDSSNVI

SEQ ID NO: 12103 - protein, 17 aa, Artificial Sequence
  Cyclic GFR-binding peptide
  MOD_RES (3)..(4): Xaa is C or S
SPXXVPQDLRSVKIAKV

SEQ ID NO: 12104 - protein, 24 aa, Artificial Sequence
  Cyclic GFR-binding peptide
  MOD_RES (6)..(7): Xaa is C or S
KIPKAXXVPTELRPVQMRKIDENE

SEQ ID NO: 12105 - protein, 17 aa, Artificial Sequence
  Cyclic GFR-binding peptide
  MOD_RES (3)..(4): Xaa is C or S
KAXXVPTELRSVKMAKV

SEQ ID NO: 12106 - protein, 16 aa, Artificial Sequence
  Cyclic GFR-binding peptide
LSNITIQIMVGRTPKV

SEQ ID NO: 12107 - protein, 19 aa, Artificial Sequence
  Cyclic GFR-binding peptide
  MOD_RES (6)..(6): Xaa is C or S
VTKPTXAPTKLRSVKVAKV

SEQ ID NO: 12108 - protein, 18 aa, Artificial Sequence
  Cyclic GFR-binding peptide
  MOD_RES (4)..(5): Xaa is C or S
AAPXXVPQALSNITIQIM

SEQ ID NO: 12109 - protein, 18 aa, Artificial Sequence
  Cyclic GFR-binding peptide
TKLRSVKVAKVDDSSNVI

SEQ ID NO: 12110 - protein, 18 aa, Artificial Sequence
  Cyclic GFR-binding peptide
TQLRSVKVAKVDDSSNVI

SEQ ID NO: 12111 - protein, 26 aa, Artificial Sequence
  Cyclic GFR-binding peptide
  MOD_RES (6)..(7): Xaa is C or S
KIPKAXXVPTELRPVQMRKIDENEKV

SEQ ID NO: 12112 - protein, 26 aa, Artificial Sequence
  Cyclic GFR-binding peptide
  MOD_RES (6)..(7): Xaa is C or S
SIPKAXXVPTELSNITMQIMDEYDKV

SEQ ID NO: 12113 - protein, 23 aa, Artificial Sequence
  Cyclic GFR-binding peptide
  MOD_RES (6)..(7): Xaa is C or S
KIPKAXXVPTELRSVKMAKVDEN

SEQ ID NO: 12114 - protein, 19 aa, Artificial Sequence
  Cyclic GFR-binding peptide
PTKLRSVKVAKVDDSSNVI

SEQ ID NO: 12115 - protein, 18 aa, Artificial Sequence
  Cyclic GFR-binding peptide
  MOD_RES (4)..(5): Xaa is C or S
ASPXXVSQDLRSVKIAKV

SEQ ID NO: 12116 - protein, 18 aa, Artificial Sequence
  Cyclic GFR-binding peptide
TQLRPVQVRKIDDSSNVI

SEQ ID NO: 12117 - protein, 18 aa, Artificial Sequence
  Cyclic GFR-binding peptide
TKLRPVQVRKIDDSSNVI

SEQ ID NO: 12118 - protein, 29 aa, Artificial Sequence
  Cyclic GFR-binding peptide
  MOD_RES (7)..(7): Xaa is C or S
NDEGLEXVPTEEEPLPMVYYRIKPHQGQH

SEQ ID NO: 12119 - protein, 19 aa, Artificial Sequence
  Cyclic GFR-binding peptide
PQDLRSVKIAKVVGRTPKV

SEQ ID NO: 12120 - protein, 14 aa, Artificial Sequence
  Cyclic GFR-binding peptide
  MOD_RES (1)..(1): Xaa is C or S
XAPTKLRSVKVAKV

SEQ ID NO: 12121 - protein, 18 aa, Artificial Sequence
  Cyclic GFR-binding peptide
  MOD_RES (4)..(5): Xaa is C or S
PKPXXAPTKLRPVQVRKI

SEQ ID NO: 12122 - protein, 27 aa, Artificial Sequence
  Cyclic GFR-binding peptide
  MOD_RES (7)..(7): Xaa is C or S
HVTKPTXAPTKLRPVQVRKIDDSSNVI

SEQ ID NO: 12123 - protein, 24 aa, Artificial Sequence
  Cyclic GFR-binding peptide
  MOD_RES (7)..(7): Xaa is C or S
HVTKPTXAPTKLRSVKVAKVDDSS

SEQ ID NO: 12124 - protein, 19 aa, Artificial Sequence
  Cyclic GFR-binding peptide
PQDLRPVQIRKIVGRTPKV

SEQ ID NO: 12125 - protein, 21 aa, Artificial Sequence
  Cyclic GFR-binding peptide
  MOD_RES (6)..(7): Xaa is C or S
ASAAPXXVPQALRSVKIAKVV

SEQ ID NO: 12126 - protein, 19 aa, Artificial Sequence
  Cyclic GFR-binding peptide
  MOD_RES (5)..(6): Xaa is C or S
IPKAXXVPTELSNITMQIM

SEQ ID NO: 12127 - protein, 27 aa, Artificial Sequence
  Cyclic GFR-binding peptide
  MOD_RES (7)..(7): Xaa is C or S
HVTKPTXAPTKLSNITVQIMDDSSNVI

SEQ ID NO: 12128 - protein, 16 aa, Artificial Sequence
  Cyclic GFR-binding peptide
LRSVKMAKVDEYDKVV

SEQ ID NO: 12129 - protein, 27 aa, Artificial Sequence
  Cyclic GFR-binding peptide
  MOD_RES (6)..(7): Xaa is C or S
SIPKAXXVPTELRPVQMRKIDEYDKVV

SEQ ID NO: 12130 - protein, 16 aa, Artificial Sequence
  Cyclic GFR-binding peptide
  MOD_RES (2)..(3): Xaa is C or S
PXXVPQALSNITIQIM

SEQ ID NO: 12131 - protein, 28 aa, Artificial Sequence
  Cyclic GFR-binding peptide
  MOD_RES (5)..(5): Xaa is C or S
SSVKXQPSRVHHEPLTVLYYEYVRKKPK

SEQ ID NO: 12132 - protein, 16 aa, Artificial Sequence
  Cyclic GFR-binding peptide
  MOD_RES (2)..(3): Xaa is C or S
PXXVPQDLSNITIQIM

SEQ ID NO: 12133 - protein, 14 aa, Artificial Sequence
  Cyclic GFR-binding peptide
PSRVHHEPLPVVYY

SEQ ID NO: 12134 - protein, 17 aa, Artificial Sequence
  Cyclic GFR-binding peptide
  MOD_RES (4)..(4): Xaa is C or S
KPTXAPTKLSNITVQIM

SEQ ID NO: 12135 - protein, 16 aa, Artificial Sequence
  Cyclic GFR-binding peptide
LRPVQMRKIDEYDKVV

SEQ ID NO: 12136 - protein, 24 aa, Artificial Sequence
  Cyclic GFR-binding peptide
  MOD_RES (7)..(7): Xaa is C or S
HVTKPTXAPTKLSNITVQIMDDSS

SEQ ID NO: 12137 - protein, 15 aa, Artificial Sequence
  Cyclic GFR-binding peptide
  MOD_RES (1)..(2): Xaa is C or S
XXVSQDLSNITIQIM

SEQ ID NO: 12138 - protein, 15 aa, Artificial Sequence
  Cyclic GFR-binding peptide
SNITIQIMVGRTPKV

SEQ ID NO: 12139 - protein, 27 aa, Artificial Sequence
  Cyclic GFR-binding peptide
  MOD_RES (7)..(7): Xaa is C or S
NDEGLEXVPTEEEPLPMVYYRIKPHQG

SEQ ID NO: 12140 - protein, 16 aa, Artificial Sequence
  Cyclic GFR-binding peptide
  MOD_RES (3)..(3): Xaa is C or S
LEXVPTEEEPLPMVYY

SEQ ID NO: 12141 - protein, 25 aa, Artificial Sequence
  Cyclic GFR-binding peptide
  MOD_RES (7)..(7): Xaa is C or S
HVTKPTXAPTKLRPVQVRKIDDSSN

SEQ ID NO: 12142 - protein, 15 aa, Artificial Sequence
  Cyclic GFR-binding peptide
SNITMQIMDENEKVV

SEQ ID NO: 12143 - protein, 25 aa, Artificial Sequence
  Cyclic GFR-binding peptide
  MOD_RES (6)..(7): Xaa is C or S
ASASPXXVSQDLSNITIQIMIGKTP

SEQ ID NO: 12144 - protein, 20 aa, Artificial Sequence
  Cyclic GFR-binding peptide
VHHEPLPVVYYEYVRKKPKL

SEQ ID NO: 12145 - protein, 25 aa, Artificial Sequence
  Cyclic GFR-binding peptide
  MOD_RES (7)..(7): Xaa is C or S
NDEGLEXVPTEEEPLTMLYYRIKPH

SEQ ID NO: 12146 - protein, 17 aa, Artificial Sequence
  Cyclic GFR-binding peptide
EPLPVVYYEIVRKKPIF

SEQ ID NO: 12147 - protein, 18 aa, Artificial Sequence
  Cyclic GFR-binding peptide
EEPLPMVYYRIKPHQGQH

SEQ ID NO: 12148 - protein, 21 aa, Artificial Sequence
  Cyclic GFR-binding peptide
  MOD_RES (5)..(5): Xaa is C or S
RNVQXRPTQVQLEPLTVLYYE

SEQ ID NO: 12149 - protein, 22 aa, Artificial Sequence
  Cyclic GFR-binding peptide
  MOD_RES (6)..(7): Xaa is C or S
ASAAPXXVPQALRSVKIAKVVG

SEQ ID NO: 12150 - protein, 26 aa, Artificial Sequence
  Cyclic GFR-binding peptide
  MOD_RES (6)..(7): Xaa is C or S
ASASPXXVSQDLRPVQIRKIIGKTPK

SEQ ID NO: 12151 - protein, 18 aa, Artificial Sequence
  Cyclic GFR-binding peptide
TELRPVQMRKIDENEKVV

SEQ ID NO: 12152 - protein, 18 aa, Artificial Sequence
  Cyclic GFR-binding peptide
  MOD_RES (5)..(5): Xaa is C or S
TKPTXAPTKLSNITVQIM

SEQ ID NO: 12153 - protein, 21 aa, Artificial Sequence
  Cyclic GFR-binding peptide
  MOD_RES (6)..(7): Xaa is C or S
YVPKPXXAPTKLRPVQVRKID

SEQ ID NO: 12154 - protein, 21 aa, Artificial Sequence
  Cyclic GFR-binding peptide
  MOD_RES (6)..(7): Xaa is C or S
ASASPXXVSQDLSNITIQIMI

SEQ ID NO: 12155 - protein, 21 aa, Artificial Sequence
  Cyclic GFR-binding peptide
  MOD_RES (5)..(5): Xaa is C or S
SSVKXQPSRVHHEPLPVVYYE

SEQ ID NO: 12156 - protein, 15 aa, Artificial Sequence
  Cyclic GFR-binding peptide
  MOD_RES (1)..(2): Xaa is C or S
XXVPQDLSNITIQIM

SEQ ID NO: 12157 - protein, 13 aa, Artificial Sequence
  Cyclic GFR-binding peptide
APTKLRPVQVRKI

SEQ ID NO: 12158 - protein, 17 aa, Artificial Sequence
  Cyclic GFR-binding peptide
DLRSVKIAKVVGRTPKV

SEQ ID NO: 12159 - protein, 13 aa, Artificial Sequence
  Cyclic GFR-binding peptide
APTQLSNITVQIM

SEQ ID NO: 12160 - protein, 18 aa, Artificial Sequence
  Cyclic GFR-binding peptide
LEPLTVLYYEIVRKKPIF

SEQ ID NO: 12161 - protein, 13 aa, Artificial Sequence
  Cyclic GFR-binding peptide
TQVQLEPLTVLYY

SEQ ID NO: 12162 - protein, 15 aa, Artificial Sequence
  Cyclic GFR-binding peptide
  MOD_RES (1)..(2): Xaa is C or S
XXVPTELRSVKMAKV

SEQ ID NO: 12163 - protein, 25 aa, Artificial Sequence
  Cyclic GFR-binding peptide
  MOD_RES (6)..(7): Xaa is C or S
ASASPXXVSQDLRSVKIAKVIGKTP

SEQ ID NO: 12164 - protein, 17 aa, Artificial Sequence
  Cyclic GFR-binding peptide
  MOD_RES (4)..(4): Xaa is C or S
KPTXAPTKLRPVQVRKI

SEQ ID NO: 12165 - protein, 16 aa, Artificial Sequence
  Cyclic GFR-binding peptide
  MOD_RES (2)..(3): Xaa is C or S
AXXVPTELRPVQMRKI

SEQ ID NO: 12166 - protein, 14 aa, Artificial Sequence
  Cyclic GFR-binding peptide
PTQVQLEPLTVLYY

SEQ ID NO: 12167 - protein, 17 aa, Artificial Sequence
  Cyclic GFR-binding peptide
ALSNITIQIMVGRKPKV

SEQ ID NO: 12168 - protein, 21 aa, Artificial Sequence
  Cyclic GFR-binding peptide
RVHHEPLTVLYYEYVRKKPKL

SEQ ID NO: 12169 - protein, 19 aa, Artificial Sequence
  Cyclic GFR-binding peptide
  MOD_RES (4)..(4): Xaa is C or S
NVQXRPTQVQLEPLPVVYY

SEQ ID NO: 12170 - protein, 13 aa, Artificial Sequence
  Cyclic GFR-binding peptide
TQVQLEPLPVVYY

SEQ ID NO: 12171 - protein, 19 aa, Artificial Sequence
  Cyclic GFR-binding peptide
SQDLRPVQIRKIIGKTPKI

SEQ ID NO: 12172 - protein, 16 aa, Artificial Sequence
  Cyclic GFR-binding peptide
LSNITIQIMIGKTPKI

SEQ ID NO: 12173 - protein, 22 aa, Artificial Sequence
  Cyclic GFR-binding peptide
  MOD_RES (6)..(7): Xaa is C or S
KIPKAXXVPTELSNITMQIMDE

SEQ ID NO: 12174 - protein, 17 aa, Artificial Sequence
  Cyclic GFR-binding peptide
  MOD_RES (3)..(4): Xaa is C or S
KPXXAPTQLSNITVQIM

SEQ ID NO: 12175 - protein, 19 aa, Artificial Sequence
  Cyclic GFR-binding peptide
  MOD_RES (5)..(6): Xaa is C or S
VPKPXXAPTKLRSVKVAKV

SEQ ID NO: 12176 - protein, 23 aa, Artificial Sequence
  Cyclic GFR-binding peptide
  MOD_RES (7)..(7): Xaa is C or S
NDEGLEXVPTEEEPLTMLYYRIK

SEQ ID NO: 12177 - protein, 20 aa, Artificial Sequence
  Cyclic GFR-binding peptide
  MOD_RES (6)..(7): Xaa is C or S
ASASPXXVSQDLRSVKIAKV

SEQ ID NO: 12178 - protein, 24 aa, Artificial Sequence
  Cyclic GFR-binding peptide
  MOD_RES (6)..(7): Xaa is C or S
ASAAPXXVPQALSNITIQIMVGRK

SEQ ID NO: 12179 - protein, 14 aa, Artificial Sequence
  Cyclic GFR-binding peptide
  MOD_RES (1)..(1): Xaa is C or S
XVPQALRPVQIRKI

SEQ ID NO: 12180 - protein, 21 aa, Artificial Sequence
  Cyclic GFR-binding peptide
  MOD_RES (6)..(7): Xaa is C or S
KIPKAXXVPTELRSVKMAKVD

SEQ ID NO: 12181 - protein, 24 aa, Artificial Sequence
  Cyclic GFR-binding peptide
  MOD_RES (6)..(7): Xaa is C or S
YVPKPXXAPTKLRSVKVAKVDDSS

SEQ ID NO: 12182 - protein, 15 aa, Artificial Sequence
  Cyclic GFR-binding peptide
SNITVQIMDDSSNVI

SEQ ID NO: 12183 - protein, 20 aa, Artificial Sequence
  Cyclic GFR-binding peptide
  MOD_RES (6)..(7): Xaa is C or S
TVPKPXXAPTQLRSVKVAKV

SEQ ID NO: 12184 - protein, 24 aa, Artificial Sequence
  Cyclic GFR-binding peptide
  MOD_RES (6)..(7): Xaa is C or S
YVPKPXXAPTKLSNITVQIMDDSS

SEQ ID NO: 12185 - protein, 21 aa, Artificial Sequence
  Cyclic GFR-binding peptide
  MOD_RES (6)..(7): Xaa is C or S
TVPKPXXAPTQLSNITVQIMD

SEQ ID NO: 12186 - protein, 18 aa, Artificial Sequence
  Cyclic GFR-binding peptide
  MOD_RES (4)..(5): Xaa is C or S
ASPXXVPQDLRSVKIAKV

SEQ ID NO: 12187 - protein, 28 aa, Artificial Sequence
  Cyclic GFR-binding peptide
  MOD_RES (5)..(5): Xaa is C or S
SSVKXQPSRVHHEPLPVVYYEYVRKKPK

SEQ ID NO: 12188 - protein, 16 aa, Artificial Sequence
  Cyclic GFR-binding peptide
  MOD_RES (3)..(3): Xaa is C or S
LEXVPTEEEPLTMLYY

SEQ ID NO: 12189 - protein, 14 aa, Artificial Sequence
  Cyclic GFR-binding peptide
  MOD_RES (1)..(1): Xaa is C or S
XAPTQLRSVKVAKV

SEQ ID NO: 12190 - protein, 15 aa, Artificial Sequence
  Cyclic GFR-binding peptide
  MOD_RES (1)..(2): Xaa is C or S
XXVPQALSNITIQIM

SEQ ID NO: 12191 - protein, 14 aa, Artificial Sequence
  Cyclic GFR-binding peptide
  MOD_RES (1)..(1): Xaa is C or S
XVPQDLRPVQIRKI

SEQ ID NO: 12192 - protein, 18 aa, Artificial Sequence
  Cyclic GFR-binding peptide
  MOD_RES (4)..(5): Xaa is C or S
PKPXXAPTKLSNITVQIM

SEQ ID NO: 12193 - protein, 15 aa, Artificial Sequence
  Cyclic GFR-binding peptide
RPTQVQLEPLPVVYY

SEQ ID NO: 12194 - protein, 18 aa, Artificial Sequence
  Cyclic GFR-binding peptide
  MOD_RES (4)..(5): Xaa is C or S
PKAXXVPTELRSVKMAKV

SEQ ID NO: 12195 - protein, 19 aa, Artificial Sequence
  Cyclic GFR-binding peptide
  MOD_RES (5)..(6): Xaa is C or S
SAAPXXVPQALRSVKIAKV

SEQ ID NO: 12196 - protein, 22 aa, Artificial Sequence
  Cyclic GFR-binding peptide
  MOD_RES (6)..(7): Xaa is C or S
KIPKAXXVPTELRSVKMAKVDE

SEQ ID NO: 12197 - protein, 16 aa, Artificial Sequence
  Cyclic GFR-binding peptide
  MOD_RES (1)..(1): Xaa is C or S
XRPTQVQLEPLTVLYY

SEQ ID NO: 12198 - protein, 14 aa, Artificial Sequence
  Cyclic GFR-binding peptide
  MOD_RES (1)..(1): Xaa is C or S
XVSQDLSNITIQIM

SEQ ID NO: 12199 - protein, 21 aa, Artificial Sequence
  Cyclic GFR-binding peptide
PTEEEPLPMVYYRIKPHQGQH

SEQ ID NO: 12200 - protein, 18 aa, Artificial Sequence
  Cyclic GFR-binding peptide
  MOD_RES (4)..(5): Xaa is C or S
PKPXXAPTQLRPVQVRKI

SEQ ID NO: 12201 - protein, 18 aa, Artificial Sequence
  Cyclic GFR-binding peptide
QDLRPVQIRKIVGRTPKV

SEQ ID NO: 12202 - protein, 23 aa, Artificial Sequence
  Cyclic GFR-binding peptide
  MOD_RES (7)..(7): Xaa is C or S
HVTKPTXAPTKLRSVKVAKVDDS

SEQ ID NO: 12203 - protein, 21 aa, Artificial Sequence
  Cyclic GFR-binding peptide
QVQLEPLTVLYYEIVRKKPIF

SEQ ID NO: 12204 - protein, 26 aa, Artificial Sequence
  Cyclic GFR-binding peptide
  MOD_RES (6)..(7): Xaa is C or S
ASASPXXVPQDLRPVQIRKIVGRTPK

SEQ ID NO: 12205 - protein, 26 aa, Artificial Sequence
  Cyclic GFR-binding peptide
  MOD_RES (5)..(5): Xaa is C or S
RNVQXRPTQVQLEPLTVLYYEIVRKK

SEQ ID NO: 12206 - protein, 17 aa, Artificial Sequence
  Cyclic GFR-binding peptide
  MOD_RES (3)..(4): Xaa is C or S
KPXXAPTKLSNITVQIM

SEQ ID NO: 12207 - protein, 21 aa, Artificial Sequence
  Cyclic GFR-binding peptide
  MOD_RES (6)..(7): Xaa is C or S
SIPKAXXVPTELSNITMQIMD

SEQ ID NO: 12208 - protein, 20 aa, Artificial Sequence
  Cyclic GFR-binding peptide
TEEEPLPMVYYRIKPHQGQH

SEQ ID NO: 12209 - protein, 25 aa, Artificial Sequence
  Cyclic GFR-binding peptide
  MOD_RES (6)..(7): Xaa is C or S
ASASPXXVPQDLRSVKIAKVVGRTP

SEQ ID NO: 12210 - protein, 21 aa, Artificial Sequence
  Cyclic GFR-binding peptide
  MOD_RES (6)..(7): Xaa is C or S
ASASPXXVPQDLSNITIQIMV

SEQ ID NO: 12211 - protein, 20 aa, Artificial Sequence
  Cyclic GFR-binding peptide
  MOD_RES (6)..(7): Xaa is C or S
SIPKAXXVPTELRSVKMAKV

SEQ ID NO: 12212 - protein, 25 aa, Artificial Sequence
  Cyclic GFR-binding peptide
  MOD_RES (6)..(7): Xaa is C or S
KIPKAXXVPTELRSVKMAKVDENEK

SEQ ID NO: 12213 - protein, 15 aa, Artificial Sequence
  Cyclic GFR-binding peptide
RPVQIRKIIGKTPKI

SEQ ID NO: 12214 - protein, 27 aa, Artificial Sequence
  Cyclic GFR-binding peptide
  MOD_RES (6)..(7): Xaa is C or S
YVPKPXXAPTKLRSVKVAKVDDSSNVI

SEQ ID NO: 12215 - protein, 19 aa, Artificial Sequence
  Cyclic GFR-binding peptide
EEEPLPMVYYRIKPHQGQH

SEQ ID NO: 12216 - protein, 17 aa, Artificial Sequence
  Cyclic GFR-binding peptide
EPLTVLYYEYVRKKPKL

SEQ ID NO: 12217 - protein, 19 aa, Artificial Sequence
  Cyclic GFR-binding peptide
  MOD_RES (4)..(4): Xaa is C or S
NVQXRPTQVQLEPLTVLYY

SEQ ID NO: 12218 - protein, 19 aa, Artificial Sequence
  Cyclic GFR-binding peptide
HHEPLTVLYYEYVRKKPKL

SEQ ID NO: 12219 - protein, 26 aa, Artificial Sequence
  Cyclic GFR-binding peptide
  MOD_RES (20)..(21): Xaa is C or S
IQQKDNFYLMSIANMKTPTXXPGASG

SEQ ID NO: 12220 - protein, 17 aa, Artificial Sequence
  Cyclic GFR-binding peptide
LLVRGNDFYLMSIANTK

SEQ ID NO: 12221 - protein, 19 aa, Artificial Sequence
  Cyclic GFR-binding peptide
IIQQKDNFYLMSIANMKTP

SEQ ID NO: 12222 - protein, 16 aa, Artificial Sequence
  Cyclic GFR-binding peptide
IIQQKDNFYLMSIANM

SEQ ID NO: 12223 - protein, 25 aa, Artificial Sequence
  Cyclic GFR-binding peptide
  MOD_RES (19)..(20): Xaa is C or S
QQKDNFYLMSIANMKTPTXXPGASG

SEQ ID NO: 12224 - protein, 15 aa, Artificial Sequence
  Cyclic GFR-binding peptide
  MOD_RES (14)..(15): Xaa is C or S
FYLMSIANTKVPAXX

SEQ ID NO: 12225 - protein, 21 aa, Artificial Sequence
  Cyclic GFR-binding peptide
  MOD_RES (15)..(16): Xaa is C or S
DFYLMSIANTKVPAXXTSPVR

SEQ ID NO: 12226 - protein, 27 aa, Artificial Sequence
  Cyclic GFR-binding peptide
  MOD_RES (21)..(22): Xaa is C or S
LLVRGNDFYLMSIANTKVPAXXTSPVR

SEQ ID NO: 12227 - protein, 24 aa, Artificial Sequence
  Cyclic GFR-binding peptide
  MOD_RES (18)..(19): Xaa is C or S
QKDNFYLMSIANMKTPTXXPGASG

SEQ ID NO: 12228 - protein, 19 aa, Artificial Sequence
  Cyclic GFR-binding peptide
LLVRGNDFYLMSIANTKVP

SEQ ID NO: 12229 - protein, 20 aa, Artificial Sequence
  Cyclic GFR-binding peptide
  MOD_RES (14)..(15): Xaa is C or S
FYLMSIANMKTPTXXPGASG

SEQ ID NO: 12230 - protein, 13 aa, Artificial Sequence
  Cyclic GFR-binding peptide
FYLMSIANMKTPT

SEQ ID NO: 12231 - protein, 20 aa, Artificial Sequence
  Cyclic GFR-binding peptide
  MOD_RES (14)..(15): Xaa is C or S
FYLMSIANTKVPAXXTSPVR

SEQ ID NO: 12232 - protein, 14 aa, Artificial Sequence
  Cyclic GFR-binding peptide
  MOD_RES (14)..(14): Xaa is C or S
FYLMSIANTKVPAX

SEQ ID NO: 12233 - protein, 19 aa, Artificial Sequence
  Cyclic GFR-binding peptide
  MOD_RES (14)..(15): Xaa is C or S
FYLMSIANTKVPAXXTSPV

SEQ ID NO: 12234 - protein, 17 aa, Artificial Sequence
  Cyclic GFR-binding peptide
IIQQKDNFYLMSIANMK

SEQ ID NO: 12235 - protein, 25 aa, Artificial Sequence
  Cyclic GFR-binding peptide
  MOD_RES (19)..(20): Xaa is C or S
VRGNDFYLMSIANTKVPAXXTSPVR

SEQ ID NO: 12236 - protein, 21 aa, Artificial Sequence
  Cyclic GFR-binding peptide
  MOD_RES (15)..(16): Xaa is C or S
NFYLMSIANMKTPTXXPGASG

SEQ ID NO: 12237 - protein, 18 aa, Artificial Sequence
  Cyclic GFR-binding peptide
IIQQKDNFYLMSIANMKT

SEQ ID NO: 12238 - protein, 15 aa, Artificial Sequence
  Cyclic GFR-binding peptide
LLVRGNDFYLMSIAN

SEQ ID NO: 12239 - protein, 23 aa, Artificial Sequence
  Cyclic GFR-binding peptide
  MOD_RES (17)..(18): Xaa is C or S
KDNFYLMSIANMKTPTXXPGASG

SEQ ID NO: 12240 - protein, 16 aa, Artificial Sequence
  Cyclic GFR-binding peptide
  MOD_RES (14)..(15): Xaa is C or S
FYLMSIANMKTPTXXP

SEQ ID NO: 12241 - protein, 22 aa, Artificial Sequence
  Cyclic GFR-binding peptide
  MOD_RES (16)..(17): Xaa is C or S
NDFYLMSIANTKVPAXXTSPVR

SEQ ID NO: 12242 - protein, 15 aa, Artificial Sequence
  Cyclic GFR-binding peptide
  MOD_RES (14)..(15): Xaa is C or S
FYLMSIANMKTPTXX

SEQ ID NO: 12243 - protein, 17 aa, Artificial Sequence
  Cyclic GFR-binding peptide
  MOD_RES (14)..(15): Xaa is C or S
FYLMSIANMKTPTXXPG

SEQ ID NO: 12244 - protein, 24 aa, Artificial Sequence
  Cyclic GFR-binding peptide
  MOD_RES (18)..(19): Xaa is C or S
RGNDFYLMSIANTKVPAXXTSPVR

SEQ ID NO: 12245 - protein, 18 aa, Artificial Sequence
  Cyclic GFR-binding peptide
  MOD_RES (14)..(15): Xaa is C or S
FYLMSIANMKTPTXXPGA

SEQ ID NO: 12246 - protein, 26 aa, Artificial Sequence
  Cyclic GFR-binding peptide
  MOD_RES (20)..(21): Xaa is C or S
LVRGNDFYLMSIANTKVPAXXTSPVR

SEQ ID NO: 12247 - protein, 18 aa, Artificial Sequence
  Cyclic GFR-binding peptide
LLVRGNDFYLMSIANTKV

SEQ ID NO: 12248 - protein, 16 aa, Artificial Sequence
  Cyclic GFR-binding peptide
LLVRGNDFYLMSIANT

SEQ ID NO: 12249 - protein, 19 aa, Artificial Sequence
  Cyclic GFR-binding peptide
  MOD_RES (14)..(15): Xaa is C or S
FYLMSIANMKTPTXXPGAS

SEQ ID NO: 12250 - protein, 23 aa, Artificial Sequence
  Cyclic GFR-binding peptide
  MOD_RES (17)..(18): Xaa is C or S
GNDFYLMSIANTKVPAXXTSPVR

SEQ ID NO: 12251 - protein, 18 aa, Artificial Sequence
  Cyclic GFR-binding peptide
  MOD_RES (14)..(15): Xaa is C or S
FYLMSIANTKVPAXXTSP

SEQ ID NO: 12252 - protein, 16 aa, Artificial Sequence
  Cyclic GFR-binding peptide
  MOD_RES (14)..(15): Xaa is C or S
FYLMSIANTKVPAXXT

SEQ ID NO: 12253 - protein, 13 aa, Artificial Sequence
  Cyclic GFR-binding peptide
FYLMSIANTKVPA

SEQ ID NO: 12254 - protein, 14 aa, Artificial Sequence
  Cyclic GFR-binding peptide
  MOD_RES (14)..(14): Xaa is C or S
FYLMSIANMKTPTX

SEQ ID NO: 12255 - protein, 15 aa, Artificial Sequence
  Cyclic GFR-binding peptide
IIQQKDNFYLMSIAN

SEQ ID NO: 12256 - protein, 27 aa, Artificial Sequence
  Cyclic GFR-binding peptide
  MOD_RES (21)..(22): Xaa is C or S
IIQQKDNFYLMSIANMKTPTXXPGASG

SEQ ID NO: 12257 - protein, 22 aa, Artificial Sequence
  Cyclic GFR-binding peptide
  MOD_RES (16)..(17): Xaa is C or S
DNFYLMSIANMKTPTXXPGASG

SEQ ID NO: 12258 - protein, 17 aa, Artificial Sequence
  Cyclic GFR-binding peptide
  MOD_RES (14)..(15): Xaa is C or S
FYLMSIANTKVPAXXTS

SEQ ID NO: 12259 - protein, 26 aa, Artificial Sequence
  Cyclic GFR-binding peptide
  MOD_RES (6)..(7): Xaa is C or S
GSAGPXXTPTKMNAISMLYFNDKQQI

SEQ ID NO: 12260 - protein, 17 aa, Artificial Sequence
  Cyclic GFR-binding peptide
KTNAISMLYFDNGRVLL

SEQ ID NO: 12261 - protein, 19 aa, Artificial Sequence
  Cyclic GFR-binding peptide
PTKMNAISMLYFNDKQQII

SEQ ID NO: 12262 - protein, 16 aa, Artificial Sequence
  Cyclic GFR-binding peptide
MNAISMLYFNDKQQII

SEQ ID NO: 12263 - protein, 25 aa, Artificial Sequence
  Cyclic GFR-binding peptide
  MOD_RES (6)..(7): Xaa is C or S
GSAGPXXTPTKMNAISMLYFNDKQQ

SEQ ID NO: 12264 - protein, 15 aa, Artificial Sequence
  Cyclic GFR-binding peptide
  MOD_RES (1)..(2): Xaa is C or S
XXAPVKTNAISMLYF

SEQ ID NO: 12265 - protein, 21 aa, Artificial Sequence
  Cyclic GFR-binding peptide
  MOD_RES (6)..(7): Xaa is C or S
RVPSTXXAPVKTNAISMLYFD

SEQ ID NO: 12266 - protein, 27 aa, Artificial Sequence
  Cyclic GFR-binding peptide
  MOD_RES (6)..(7): Xaa is C or S
RVPSTXXAPVKTNAISMLYFDNGRVLL

SEQ ID NO: 12267 - protein, 24 aa, Artificial Sequence
  Cyclic GFR-binding peptide
  MOD_RES (6)..(7): Xaa is C or S
GSAGPXXTPTKMNAISMLYFNDKQ

SEQ ID NO: 12268 - protein, 19 aa, Artificial Sequence
  Cyclic GFR-binding peptide
PVKTNAISMLYFDNGRVLL

SEQ ID NO: 12269 - protein, 20 aa, Artificial Sequence
  Cyclic GFR-binding peptide
  MOD_RES (6)..(7): Xaa is C or S
GSAGPXXTPTKMNAISMLYF

SEQ ID NO: 12270 - protein, 13 aa, Artificial Sequence
  Cyclic GFR-binding peptide
TPTKMNAISMLYF

SEQ ID NO: 12271 - protein, 20 aa, Artificial Sequence
  Cyclic GFR-binding peptide
  MOD_RES (6)..(7): Xaa is C or S
RVPSTXXAPVKTNAISMLYF

SEQ ID NO: 12272 - protein, 14 aa, Artificial Sequence
  Cyclic GFR-binding peptide
  MOD_RES (1)..(1): Xaa is C or S
XAPVKTNAISMLYF

SEQ ID NO: 12273 - protein, 19 aa, Artificial Sequence
  Cyclic GFR-binding peptide
  MOD_RES (5)..(6): Xaa is C or S
VPSTXXAPVKTNAISMLYF

SEQ ID NO: 12274 - protein, 17 aa, Artificial Sequence
  Cyclic GFR-binding peptide
KMNAISMLYFNDKQQII

SEQ ID NO: 12275 - protein, 25 aa, Artificial Sequence
  Cyclic GFR-binding peptide
  MOD_RES (6)..(7): Xaa is C or S
RVPSTXXAPVKTNAISMLYFDNGRV

SEQ ID NO: 12276 - protein, 21 aa, Artificial Sequence
  Cyclic GFR-binding peptide
  MOD_RES (6)..(7): Xaa is C or S
GSAGPXXTPTKMNAISMLYFN

SEQ ID NO: 12277 - protein, 18 aa, Artificial Sequence
  Cyclic GFR-binding peptide
TKMNAISMLYFNDKQQII

SEQ ID NO: 12278 - protein, 15 aa, Artificial Sequence
  Cyclic GFR-binding peptide
NAISMLYFDNGRVLL

SEQ ID NO: 12279 - protein, 23 aa, Artificial Sequence
  Cyclic GFR-binding peptide
  MOD_RES (6)..(7): Xaa is C or S
GSAGPXXTPTKMNAISMLYFNDK

SEQ ID NO: 12280 - protein, 16 aa, Artificial Sequence
  Cyclic GFR-binding peptide
  MOD_RES (2)..(3): Xaa is C or S
PXXTPTKMNAISMLYF

SEQ ID NO: 12281 - protein, 22 aa, Artificial Sequence
  Cyclic GFR-binding peptide
  MOD_RES (6)..(7): Xaa is C or S
RVPSTXXAPVKTNAISMLYFDN

SEQ ID NO: 12282 - protein, 15 aa, Artificial Sequence
  Cyclic GFR-binding peptide
  MOD_RES (1)..(2): Xaa is C or S
XXTPTKMNAISMLYF

SEQ ID NO: 12283 - protein, 17 aa, Artificial Sequence
  Cyclic GFR-binding peptide
  MOD_RES (3)..(4): Xaa is C or S
GPXXTPTKMNAISMLYF

SEQ ID NO: 12284 - protein, 24 aa, Artificial Sequence
  Cyclic GFR-binding peptide
  MOD_RES (6)..(7): Xaa is C or S
RVPSTXXAPVKTNAISMLYFDNGR

SEQ ID NO: 12285 - protein, 18 aa, Artificial Sequence
  Cyclic GFR-binding peptide
  MOD_RES (4)..(5): Xaa is C or S
AGPXXTPTKMNAISMLYF

SEQ ID NO: 12286 - protein, 26 aa, Artificial Sequence
  Cyclic GFR-binding peptide
  MOD_RES (6)..(7): Xaa is C or S
RVPSTXXAPVKTNAISMLYFDNGRVL

SEQ ID NO: 12287 - protein, 18 aa, Artificial Sequence
  Cyclic GFR-binding peptide
VKTNAISMLYFDNGRVLL

SEQ ID NO: 12288 - protein, 16 aa, Artificial Sequence
  Cyclic GFR-binding peptide
TNAISMLYFDNGRVLL

SEQ ID NO: 12289 - protein, 19 aa, Artificial Sequence
  Cyclic GFR-binding peptide
  MOD_RES (5)..(6): Xaa is C or S
SAGPXXTPTKMNAISMLYF

SEQ ID NO: 12290 - protein, 23 aa, Artificial Sequence
  Cyclic GFR-binding peptide
  MOD_RES (6)..(7): Xaa is C or S
RVPSTXXAPVKTNAISMLYFDNG

SEQ ID NO: 12291 - protein, 18 aa, Artificial Sequence
  Cyclic GFR-binding peptide
  MOD_RES (4)..(5): Xaa is C or S
PSTXXAPVKTNAISMLYF

SEQ ID NO: 12292 - protein, 16 aa, Artificial Sequence
  Cyclic GFR-binding peptide
  MOD_RES (2)..(3): Xaa is C or S
TXXAPVKTNAISMLYF

SEQ ID NO: 12293 - protein, 13 aa, Artificial Sequence
  Cyclic GFR-binding peptide
APVKTNAISMLYF

SEQ ID NO: 12294 - protein, 14 aa, Artificial Sequence
  Cyclic GFR-binding peptide
  MOD_RES (1)..(1): Xaa is C or S
XTPTKMNAISMLYF

SEQ ID NO: 12295 - protein, 15 aa, Artificial Sequence
  Cyclic GFR-binding peptide
NAISMLYFNDKQQII

SEQ ID NO: 12296 - protein, 27 aa, Artificial Sequence
  Cyclic GFR-binding peptide
  MOD_RES (6)..(7): Xaa is C or S
GSAGPXXTPTKMNAISMLYFNDKQQII

SEQ ID NO: 12297 - protein, 22 aa, Artificial Sequence
  Cyclic GFR-binding peptide
  MOD_RES (6)..(7): Xaa is C or S
GSAGPXXTPTKMNAISMLYFND

SEQ ID NO: 12298 - protein, 17 aa, Artificial Sequence
  Cyclic GFR-binding peptide
  MOD_RES (3)..(4): Xaa is C or S
STXXAPVKTNAISMLYF

SEQ ID NO: 12299 - protein, 16 aa, Artificial Sequence
  Cyclic GFR-binding peptide
VVNNASDYYLISTASL

SEQ ID NO: 12300 - protein, 13 aa, Artificial Sequence
  Cyclic GFR-binding peptide
YYLISTASLRTPV

SEQ ID NO: 12301 - protein, 24 aa, Artificial Sequence
  Cyclic GFR-binding peptide
  MOD_RES (18)..(19): Xaa is C or S
KNEDFYLINIPSMKEPVXXPEPIG

SEQ ID NO: 12302 - protein, 14 aa, Artificial Sequence
  Cyclic GFR-binding peptide
  MOD_RES (14)..(14): Xaa is C or S
YYLISTASMKEPVX

SEQ ID NO: 12303 - protein, 18 aa, Artificial Sequence
  Cyclic GFR-binding peptide
  MOD_RES (14)..(15): Xaa is C or S
FYLINIPSMKEPVXXPEP

SEQ ID NO: 12304 - protein, 19 aa, Artificial Sequence
  Cyclic GFR-binding peptide
  MOD_RES (14)..(15): Xaa is C or S
YYLMSTASTKVPAXXTSPV

SEQ ID NO: 12305 - protein, 21 aa, Artificial Sequence
  Cyclic GFR-binding peptide
  MOD_RES (15)..(16): Xaa is C or S
DLYLISIPEMKEPVXXPEPIG

SEQ ID NO: 12306 - protein, 16 aa, Artificial Sequence
  Cyclic GFR-binding peptide
  MOD_RES (14)..(15): Xaa is C or S
KYLISIPSMKEPVXXP

SEQ ID NO: 12307 - protein, 15 aa, Artificial Sequence
  Cyclic GFR-binding peptide
IIQQKDNKYLMSIPS

SEQ ID NO: 12308 - protein, 27 aa, Artificial Sequence
  Cyclic GFR-binding peptide
  MOD_RES (21)..(22): Xaa is C or S
IIQQKDNKYLMSIPSMKTPTXXPGASG

SEQ ID NO: 12309 - protein, 24 aa, Artificial Sequence
  Cyclic GFR-binding peptide
  MOD_RES (18)..(19): Xaa is C or S
NASDLYLISIPELRTPVXXTPPTS

SEQ ID NO: 12310 - protein, 27 aa, Artificial Sequence
  Cyclic GFR-binding peptide
  MOD_RES (21)..(22): Xaa is C or S
VVNKNEDKYLISIPSMKEPVXXPEPIG

SEQ ID NO: 12311 - protein, 24 aa, Artificial Sequence
  Cyclic GFR-binding peptide
  MOD_RES (18)..(19): Xaa is C or S
KNEDYYLISTASMKEPVXXPEPIG

SEQ ID NO: 12312 - protein, 25 aa, Artificial Sequence
  Cyclic GFR-binding peptide
  MOD_RES (19)..(20): Xaa is C or S
NKNEDYYLISTASMKEPVXXPEPIG

SEQ ID NO: 12313 - protein, 14 aa, Artificial Sequence
  Cyclic GFR-binding peptide
  MOD_RES (14)..(14): Xaa is C or S
FYLINIPSLDQPVX

SEQ ID NO: 12314 - protein, 21 aa, Artificial Sequence
  Cyclic GFR-binding peptide
  MOD_RES (15)..(16): Xaa is C or S
NYYLMSTASMKTPTXXPGASG

SEQ ID NO: 12315 - protein, 17 aa, Artificial Sequence
  Cyclic GFR-binding peptide
  MOD_RES (14)..(15): Xaa is C or S
FYLINIPSLAQPVXXPA

SEQ ID NO: 12316 - protein, 17 aa, Artificial Sequence
  Cyclic GFR-binding peptide
  MOD_RES (14)..(15): Xaa is C or S
YYLMSTASMKTPTXXPG

SEQ ID NO: 12317 - protein, 19 aa, Artificial Sequence
  Cyclic GFR-binding peptide
LLVRGNDYYLMSTASTKVP

SEQ ID NO: 12318 - protein, 22 aa, Artificial Sequence
  Cyclic GFR-binding peptide
  MOD_RES (16)..(17): Xaa is C or S
GVFYLINIPSLDQPVXXPSASA

SEQ ID NO: 12319 - protein, 17 aa, Artificial Sequence
  Cyclic GFR-binding peptide
  MOD_RES (14)..(15): Xaa is C or S
FYLINIPSLDQPVXXPS

SEQ ID NO: 12320 - protein, 15 aa, Artificial Sequence
  Cyclic GFR-binding peptide
  MOD_RES (14)..(15): Xaa is C or S
LYLMSIPEMKTPTXX

SEQ ID NO: 12321 - protein, 13 aa, Artificial Sequence
  Cyclic GFR-binding peptide
LYLMSIPEMKTPT

SEQ ID NO: 12322 - protein, 24 aa, Artificial Sequence
  Cyclic GFR-binding peptide
  MOD_RES (18)..(19): Xaa is C or S
TKGIFYLINIPSLDQSVXXPSASA

SEQ ID NO: 12323 - protein, 24 aa, Artificial Sequence
  Cyclic GFR-binding peptide
  MOD_RES (18)..(19): Xaa is C or S
RGNDYYLMSTASTKVPAXXTSPVR

SEQ ID NO: 12324 - protein, 15 aa, Artificial Sequence
  Cyclic GFR-binding peptide
VVNNASDKYLISIPS

SEQ ID NO: 12325 - protein, 15 aa, Artificial Sequence
  Cyclic GFR-binding peptide
  MOD_RES (14)..(15): Xaa is C or S
YYLMSTASTKVPAXX

SEQ ID NO: 12326 - protein, 19 aa, Artificial Sequence
  Cyclic GFR-binding peptide
  MOD_RES (14)..(15): Xaa is C or S
FYLINIPSLDQPVXXPSAS

SEQ ID NO: 12327 - protein, 20 aa, Artificial Sequence
  Cyclic GFR-binding peptide
  MOD_RES (14)..(15): Xaa is C or S
YYLISTASMKEPVXXPEPIG

SEQ ID NO: 12328 - protein, 22 aa, Artificial Sequence
  Cyclic GFR-binding peptide
  MOD_RES (16)..(17): Xaa is C or S
NDLYLMSIPETKVPAXXTSPVR

SEQ ID NO: 12329 - protein, 18 aa, Artificial Sequence
  Cyclic GFR-binding peptide
  MOD_RES (14)..(15): Xaa is C or S
LYLMSIPETKVPAXXTSP

SEQ ID NO: 12330 - protein, 20 aa, Artificial Sequence
  Cyclic GFR-binding peptide
  MOD_RES (14)..(15): Xaa is C or S
YYLISTASLRAPVXXSAPAA

SEQ ID NO: 12331 - protein, 15 aa, Artificial Sequence
  Cyclic GFR-binding peptide
VVNNASDLYLISIPE

SEQ ID NO: 12332 - protein, 19 aa, Artificial Sequence
  Cyclic GFR-binding peptide
VVNKNEDFYLINIPSMKEP

SEQ ID NO: 12333 - protein, 15 aa, Artificial Sequence
  Cyclic GFR-binding peptide
VKPTRGVFYLINIPS

SEQ ID NO: 12334 - protein, 18 aa, Artificial Sequence
  Cyclic GFR-binding peptide
VVNNASDKYLISIPSLRT

SEQ ID NO: 12335 - protein, 22 aa, Artificial Sequence
  Cyclic GFR-binding peptide
  MOD_RES (16)..(17): Xaa is C or S
DDKYLVSIPSLKTPAXXPKPVH

SEQ ID NO: 12336 - protein, 16 aa, Artificial Sequence
  Cyclic GFR-binding peptide
  MOD_RES (14)..(15): Xaa is C or S
KYLMSIPSMKTPTXXP

SEQ ID NO: 12337 - protein, 14 aa, Artificial Sequence
  Cyclic GFR-binding peptide
  MOD_RES (14)..(14): Xaa is C or S
YYLISTASLRTPVX

SEQ ID NO: 12338 - protein, 13 aa, Artificial Sequence
  Cyclic GFR-binding peptide
YYLMSTASTKVPA

SEQ ID NO: 12339 - protein, 22 aa, Artificial Sequence
  Cyclic GFR-binding peptide
  MOD_RES (16)..(17): Xaa is C or S
NDKYLMSIPSTKVPAXXTSPVR

SEQ ID NO: 12340 - protein, 14 aa, Artificial Sequence
  Cyclic GFR-binding peptide
  MOD_RES (14)..(14): Xaa is C or S
LYLMSIPEMKTPTX

SEQ ID NO: 12341 - protein, 17 aa, Artificial Sequence
  Cyclic GFR-binding peptide
YTVVGKDYYLISTASLK

SEQ ID NO: 12342 - protein, 18 aa, Artificial Sequence
  Cyclic GFR-binding peptide
  MOD_RES (14)..(15): Xaa is C or S
YYLISTASLKTPVXXAKS

SEQ ID NO: 12343 - protein, 15 aa, Artificial Sequence
  Cyclic GFR-binding peptide
LLVRGNDKYLMSIPS

SEQ ID NO: 12344 - protein, 22 aa, Artificial Sequence
  Cyclic GFR-binding peptide
  MOD_RES (16)..(17): Xaa is C or S
DDLYLVSIPELKTPAXXPKPVH

SEQ ID NO: 12345 - protein, 15 aa, Artificial Sequence
  Cyclic GFR-binding peptide
  MOD_RES (14)..(15): Xaa is C or S
YYLISTASLRTPVXX

SEQ ID NO: 12346 - protein, 17 aa, Artificial Sequence
  Cyclic GFR-binding peptide
  MOD_RES (14)..(15): Xaa is C or S
FYLISIANMKEPVXXPE

SEQ ID NO: 12347 - protein, 15 aa, Artificial Sequence
  Cyclic GFR-binding peptide
IIQQKDNLYLMSIPE

SEQ ID NO: 12348 - protein, 14 aa, Artificial Sequence
  Cyclic GFR-binding peptide
  MOD_RES (14)..(14): Xaa is C or S
YYLMSTASTKVPAX

SEQ ID NO: 12349 - protein, 16 aa, Artificial Sequence
  Cyclic GFR-binding peptide
  MOD_RES (14)..(15): Xaa is C or S
LYLMSIPETKVPAXXT

SEQ ID NO: 12350 - protein, 17 aa, Artificial Sequence
  Cyclic GFR-binding peptide
LLVRGNDLYLMSIPETK

SEQ ID NO: 12351 - protein, 15 aa, Artificial Sequence
  Cyclic GFR-binding peptide
  MOD_RES (14)..(15): Xaa is C or S
FYLINIPSLDQPVXX

SEQ ID NO: 12352 - protein, 16 aa, Artificial Sequence
  Cyclic GFR-binding peptide
VVNKNEDYYLISTASM

SEQ ID NO: 12353 - protein, 19 aa, Artificial Sequence
  Cyclic GFR-binding peptide
  MOD_RES (14)..(15): Xaa is C or S
KYLISIPSMKEPVXXPEPI

SEQ ID NO: 12354 - protein, 19 aa, Artificial Sequence
  Cyclic GFR-binding peptide
  MOD_RES (14)..(15): Xaa is C or S
YYLISTASLRTPVXXTPPT

SEQ ID NO: 12355 - protein, 21 aa, Artificial Sequence
  Cyclic GFR-binding peptide
  MOD_RES (15)..(16): Xaa is C or S
DYYLVSTASLKTPAXXPKPVH

SEQ ID NO: 12356 - protein, 20 aa, Artificial Sequence
  Cyclic GFR-binding peptide
  MOD_RES (14)..(15): Xaa is C or S
YYLMSTASTKVPAXXTSPVR

SEQ ID NO: 12357 - protein, 18 aa, Artificial Sequence
  Cyclic GFR-binding peptide
  MOD_RES (14)..(15): Xaa is C or S
LYLISIPEMKEPVXXPEP

SEQ ID NO: 12358 - protein, 18 aa, Artificial Sequence
  Cyclic GFR-binding peptide
LLVRGNDKYLMSIPSTKV

SEQ ID NO: 12359 - protein, 16 aa, Artificial Sequence
  Cyclic GFR-binding peptide
  MOD_RES (14)..(15): Xaa is C or S
YYLMSTASMKTPTXXP

SEQ ID NO: 12360 - protein, 25 aa, Artificial Sequence
  Cyclic GFR-binding peptide
  MOD_RES (19)..(20): Xaa is C or S
NKNEDFYLINIPSMKEPVXXPEPIG

SEQ ID NO: 12361 - protein, 16 aa, Artificial Sequence
  Cyclic GFR-binding peptide
  MOD_RES (14)..(15): Xaa is C or S
LYLISIPELRTPVXXT

SEQ ID NO: 12362 - protein, 13 aa, Artificial Sequence
  Cyclic GFR-binding peptide
FYLINIPSLDQPV

SEQ ID NO: 12363 - protein, 21 aa, Artificial Sequence
  Cyclic GFR-binding peptide
  MOD_RES (15)..(16): Xaa is C or S
DKYLVSIPSLKTPAXXPKPVH

SEQ ID NO: 12364 - protein, 21 aa, Artificial Sequence
  Cyclic GFR-binding peptide
  MOD_RES (15)..(16): Xaa is C or S
VFYLINIPSLAQPVXXPAASA

SEQ ID NO: 12365 - protein, 15 aa, Artificial Sequence
  Cyclic GFR-binding peptide
VVNKNEDLYLISIPE

SEQ ID NO: 12366 - protein, 14 aa, Artificial Sequence
  Cyclic GFR-binding peptide
  MOD_RES (14)..(14): Xaa is C or S
KYLISIPSLRTPVX

SEQ ID NO: 12367 - protein, 15 aa, Artificial Sequence
  Cyclic GFR-binding peptide
  MOD_RES (14)..(15): Xaa is C or S
LYLISIPEMKEPVXX

SEQ ID NO: 12368 - protein, 16 aa, Artificial Sequence
  Cyclic GFR-binding peptide
  MOD_RES (14)..(15): Xaa is C or S
YYLISTASLRTPVXXT

SEQ ID NO: 12369 - protein, 25 aa, Artificial Sequence
  Cyclic GFR-binding peptide
  MOD_RES (19)..(20): Xaa is C or S
NNASDLYLISIPELRTPVXXTPPTS

SEQ ID NO: 12370 - protein, 18 aa, Artificial Sequence
  Cyclic GFR-binding peptide
IIQQKDNKYLMSIPSMKT

SEQ ID NO: 12371 - protein, 27 aa, Artificial Sequence
  Cyclic GFR-binding peptide
  MOD_RES (21)..(22): Xaa is C or S
YTVVGKDYYLISTASLKTPVXXAKSAK

SEQ ID NO: 12372 - protein, 19 aa, Artificial Sequence
  Cyclic GFR-binding peptide
VVNNAADYYLISTASLRAP

SEQ ID NO: 12373 - protein, 24 aa, Artificial Sequence
  Cyclic GFR-binding peptide
  MOD_RES (18)..(19): Xaa is C or S
KNEDFYLISIANMKEPVXXPEPIG

SEQ ID NO: 12374 - protein, 13 aa, Artificial Sequence
  Cyclic GFR-binding peptide
YYLMSTASMKTPT

SEQ ID NO: 12375 - protein, 20 aa, Artificial Sequence
  Cyclic GFR-binding peptide
  MOD_RES (14)..(15): Xaa is C or S
LYLISIPELRTPVXXTPPTS

SEQ ID NO: 12376 - protein, 17 aa, Artificial Sequence
  Cyclic GFR-binding peptide
  MOD_RES (14)..(15): Xaa is C or S
LYLMSIPEMKTPTXXPG

SEQ ID NO: 12377 - protein, 18 aa, Artificial Sequence
  Cyclic GFR-binding peptide
  MOD_RES (14)..(15): Xaa is C or S
YYLMSTASMKTPTXXPGA

SEQ ID NO: 12378 - protein, 19 aa, Artificial Sequence
  Cyclic GFR-binding peptide
  MOD_RES (14)..(15): Xaa is C or S
KYLMSIPSTKVPAXXTSPV

SEQ ID NO: 12379 - protein, 26 aa, Artificial Sequence
  Cyclic GFR-binding peptide
  MOD_RES (20)..(21): Xaa is C or S
IQQKDNKYLMSIPSMKTPTXXPGASG

SEQ ID NO: 12380 - protein, 23 aa, Artificial Sequence
  Cyclic GFR-binding peptide
  MOD_RES (17)..(18): Xaa is C or S
NEDLYLISIPEMKEPVXXPEPIG

SEQ ID NO: 12381 - protein, 16 aa, Artificial Sequence
  Cyclic GFR-binding peptide
  MOD_RES (14)..(15): Xaa is C or S
YYLISTASLRAPVXXS

SEQ ID NO: 12382 - protein, 20 aa, Artificial Sequence
  Cyclic GFR-binding peptide
  MOD_RES (14)..(15): Xaa is C or S
LYLVSIPELKTPAXXPKPVH

SEQ ID NO: 12383 - protein, 27 aa, Artificial Sequence
  Cyclic GFR-binding peptide
  MOD_RES (21)..(22): Xaa is C or S
VVNKNEDFYLISIANMKEPVXXPEPIG

SEQ ID NO: 12384 - protein, 22 aa, Artificial Sequence
  Cyclic GFR-binding peptide
  MOD_RES (16)..(17): Xaa is C or S
DNYYLMSTASMKTPTXXPGASG

SEQ ID NO: 12385 - protein, 27 aa, Artificial Sequence
  Cyclic GFR-binding peptide
  MOD_RES (21)..(22): Xaa is C or S
VVNNAADYYLISTASLRAPVXXSAPAA

SEQ ID NO: 12386 - protein, 13 aa, Artificial Sequence
  Cyclic GFR-binding peptide
FYLINIPSMKEPV

SEQ ID NO: 12387 - protein, 26 aa, Artificial Sequence
  Cyclic GFR-binding peptide
  MOD_RES (20)..(21): Xaa is C or S
TVVGKDYYLISTASLKTPVXXAKSAK

SEQ ID NO: 12388 - protein, 15 aa, Artificial Sequence
  Cyclic GFR-binding peptide
LLVRGNDLYLMSIPE

SEQ ID NO: 12389 - protein, 24 aa, Artificial Sequence
  Cyclic GFR-binding peptide
  MOD_RES (18)..(19): Xaa is C or S
KRGVFYLINIPSLAQPVXXPAASA

SEQ ID NO: 12390 - protein, 14 aa, Artificial Sequence
  Cyclic GFR-binding peptide
  MOD_RES (14)..(14): Xaa is C or S
LYLISIPEMKEPVX

SEQ ID NO: 12391 - protein, 21 aa, Artificial Sequence
  Cyclic GFR-binding peptide
  MOD_RES (15)..(16): Xaa is C or S
NKYLMSIPSMKTPTXXPGASG

SEQ ID NO: 12392 - protein, 17 aa, Artificial Sequence
  Cyclic GFR-binding peptide
VKPTRGVFYLINIPSLD

SEQ ID NO: 12393 - protein, 19 aa, Artificial Sequence
  Cyclic GFR-binding peptide
IIQQKDNYYLMSTASMKTP

SEQ ID NO: 12394 - protein, 25 aa, Artificial Sequence
  Cyclic GFR-binding peptide
  MOD_RES (19)..(20): Xaa is C or S
PTRGVFYLINIPSLDQPVXXPSASA

SEQ ID NO: 12395 - protein, 18 aa, Artificial Sequence
  Cyclic GFR-binding peptide
VVNKNEDYYLISTASMKE

SEQ ID NO: 12396 - protein, 27 aa, Artificial Sequence
  Cyclic GFR-binding peptide
  MOD_RES (21)..(22): Xaa is C or S
VVNKNEDFYLINIPSMKEPVXXPEPIG

SEQ ID NO: 12397 - protein, 25 aa, Artificial Sequence
  Cyclic GFR-binding peptide
  MOD_RES (19)..(20): Xaa is C or S
VVGKDYYLISTASLKTPVXXAKSAK

SEQ ID NO: 12398 - protein, 15 aa, Artificial Sequence
  Cyclic GFR-binding peptide
  MOD_RES (14)..(15): Xaa is C or S
YYLISTASMKEPVXX

SEQ ID NO: 12399 - protein, 19 aa, Artificial Sequence
  Cyclic GFR-binding peptide
VKPTRGVFYLINIPSLDQP

SEQ ID NO: 12400 - protein, 23 aa, Artificial Sequence
  Cyclic GFR-binding peptide
  MOD_RES (17)..(18): Xaa is C or S
NEDFYLISIANMKEPVXXPEPIG

SEQ ID NO: 12401 - protein, 19 aa, Artificial Sequence
  Cyclic GFR-binding peptide
  MOD_RES (14)..(15): Xaa is C or S
LYLISIPELRTPVXXTPPT

SEQ ID NO: 12402 - protein, 18 aa, Artificial Sequence
  Cyclic GFR-binding peptide
  MOD_RES (14)..(15): Xaa is C or S
KYLMSIPSMKTPTXXPGA

SEQ ID NO: 12403 - protein, 14 aa, Artificial Sequence
  Cyclic GFR-binding peptide
  MOD_RES (14)..(14): Xaa is C or S
LYLMSIPETKVPAX

SEQ ID NO: 12404 - protein, 18 aa, Artificial Sequence
  Cyclic GFR-binding peptide
  MOD_RES (14)..(15): Xaa is C or S
LYLISIPELRTPVXXTPP

SEQ ID NO: 12405 - protein, 21 aa, Artificial Sequence
  Cyclic GFR-binding peptide
  MOD_RES (15)..(16): Xaa is C or S
DFYLINIPSMKEPVXXPEPIG

SEQ ID NO: 12406 - protein, 15 aa, Artificial Sequence
  Cyclic GFR-binding peptide
  MOD_RES (14)..(15): Xaa is C or S
LYLMSIPETKVPAXX

SEQ ID NO: 12407 - protein, 16 aa, Artificial Sequence
  Cyclic GFR-binding peptide
  MOD_RES (14)..(15): Xaa is C or S
YYLISTASMKEPVXXP

SEQ ID NO: 12408 - protein, 19 aa, Artificial Sequence
  Cyclic GFR-binding peptide
VVNNASDYYLISTASLRTP

SEQ ID NO: 12409 - protein, 27 aa, Artificial Sequence
  Cyclic GFR-binding peptide
  MOD_RES (21)..(22): Xaa is C or S
VVNNASDYYLISTASLRTPVXXTPPTS

SEQ ID NO: 12410 - protein, 15 aa, Artificial Sequence
  Cyclic GFR-binding peptide
YTVVGKDYYLISTAS

SEQ ID NO: 12411 - protein, 26 aa, Artificial Sequence
  Cyclic GFR-binding peptide
  MOD_RES (20)..(21): Xaa is C or S
VNNASDKYLISIPSLRTPVXXTPPTS

SEQ ID NO: 12412 - protein, 17 aa, Artificial Sequence
  Cyclic GFR-binding peptide
VVNKNEDLYLISIPEMK

SEQ ID NO: 12413 - protein, 21 aa, Artificial Sequence
  Cyclic GFR-binding peptide
  MOD_RES (15)..(16): Xaa is C or S
DYYLISTASMKEPVXXPEPIG

SEQ ID NO: 12414 - protein, 13 aa, Artificial Sequence
  Cyclic GFR-binding peptide
LYLISIPELRTPV

SEQ ID NO: 12415 - protein, 23 aa, Artificial Sequence
  Cyclic GFR-binding peptide
  MOD_RES (17)..(18): Xaa is C or S
NEDFYLINIPSMKEPVXXPEPIG

SEQ ID NO: 12416 - protein, 16 aa, Artificial Sequence
  Cyclic GFR-binding peptide
VVNNAADYYLISTASL

SEQ ID NO: 12417 - protein, 26 aa, Artificial Sequence
  Cyclic GFR-binding peptide
  MOD_RES (20)..(21): Xaa is C or S
LVRGNDKYLMSIPSTKVPAXXTSPVR

SEQ ID NO: 12418 - protein, 18 aa, Artificial Sequence
  Cyclic GFR-binding peptide
  MOD_RES (14)..(15): Xaa is C or S
YYLISTASMKEPVXXPEP

SEQ ID NO: 12419 - protein, 17 aa, Artificial Sequence
  Cyclic GFR-binding peptide
  MOD_RES (14)..(15): Xaa is C or S
LYLMSIPETKVPAXXTS

SEQ ID NO: 12420 - protein, 21 aa, Artificial Sequence
  Cyclic GFR-binding peptide
  MOD_RES (15)..(16): Xaa is C or S
DKYLISIPSLRTPVXXTPPTS

SEQ ID NO: 12421 - protein, 15 aa, Artificial Sequence
  Cyclic GFR-binding peptide
  MOD_RES (14)..(15): Xaa is C or S
KYLMSIPSTKVPAXX

SEQ ID NO: 12422 - protein, 22 aa, Artificial Sequence
  Cyclic GFR-binding peptide
  MOD_RES (16)..(17): Xaa is C or S
DDYYLVSTASLKTPAXXPKPVH

SEQ ID NO: 12423 - protein, 14 aa, Artificial Sequence
  Cyclic GFR-binding peptide
  MOD_RES (14)..(14): Xaa is C or S
LYLISIPELRTPVX

SEQ ID NO: 12424 - protein, 15 aa, Artificial Sequence
  Cyclic GFR-binding peptide
  MOD_RES (14)..(15): Xaa is C or S
FYLISIANMKEPVXX

SEQ ID NO: 12425 - protein, 14 aa, Artificial Sequence
  Cyclic GFR-binding peptide
  MOD_RES (14)..(14): Xaa is C or S
KYLMSIPSTKVPAX

SEQ ID NO: 12426 - protein, 20 aa, Artificial Sequence
  Cyclic GFR-binding peptide
  MOD_RES (14)..(15): Xaa is C or S
FYLINIPSLDQSVXXPSASA

SEQ ID NO: 12427 - protein, 26 aa, Artificial Sequence
  Cyclic GFR-binding peptide
  MOD_RES (20)..(21): Xaa is C or S
VNKNEDFYLISIANMKEPVXXPEPIG

SEQ ID NO: 12428 - protein, 16 aa, Artificial Sequence
  Cyclic GFR-binding peptide
  MOD_RES (14)..(15): Xaa is C or S
FYLINIPSLDQPVXXP

SEQ ID NO: 12429 - protein, 19 aa, Artificial Sequence
  Cyclic GFR-binding peptide
  MOD_RES (14)..(15): Xaa is C or S
YYLISTASLRAPVXXSAPA

SEQ ID NO: 12430 - protein, 18 aa, Artificial Sequence
  Cyclic GFR-binding peptide
  MOD_RES (14)..(15): Xaa is C or S
LYLMSIPEMKTPTXXPGA

SEQ ID NO: 12431 - protein, 13 aa, Artificial Sequence
  Cyclic GFR-binding peptide
KYLISIPSMKEPV

SEQ ID NO: 12432 - protein, 16 aa, Artificial Sequence
  Cyclic GFR-binding peptide
IIQQKDNYYLMSTASM

SEQ ID NO: 12433 - protein, 15 aa, Artificial Sequence
  Cyclic GFR-binding peptide
  MOD_RES (14)..(15): Xaa is C or S
KYLISIPSMKEPVXX

SEQ ID NO: 12434 - protein, 15 aa, Artificial Sequence
  Cyclic GFR-binding peptide
VVNKNEDFYLISIAN

SEQ ID NO: 12435 - protein, 19 aa, Artificial Sequence
  Cyclic GFR-binding peptide
VVNKNEDLYLISIPEMKEP

SEQ ID NO: 12436 - protein, 23 aa, Artificial Sequence
  Cyclic GFR-binding peptide
  MOD_RES (17)..(18): Xaa is C or S
KDNLYLMSIPEMKTPTXXPGASG

SEQ ID NO: 12437 - protein, 20 aa, Artificial Sequence
  Cyclic GFR-binding peptide
  MOD_RES (14)..(15): Xaa is C or S
FYLINIPSMKEPVXXPEPIG

SEQ ID NO: 12438 - protein, 19 aa, Artificial Sequence
  Cyclic GFR-binding peptide
  MOD_RES (14)..(15): Xaa is C or S
LYLMSIPETKVPAXXTSPV

SEQ ID NO: 12439 - protein, 20 aa, Artificial Sequence
  Cyclic GFR-binding peptide
  MOD_RES (14)..(15): Xaa is C or S
KYLMSIPSTKVPAXXTSPVR

SEQ ID NO: 12440 - protein, 24 aa, Artificial Sequence
  Cyclic GFR-binding peptide
  MOD_RES (18)..(19): Xaa is C or S
KNEDLYLISIPEMKEPVXXPEPIG

SEQ ID NO: 12441 - protein, 26 aa, Artificial Sequence
  Cyclic GFR-binding peptide
  MOD_RES (20)..(21): Xaa is C or S
VNKNEDKYLISIPSMKEPVXXPEPIG

SEQ ID NO: 12442 - protein, 14 aa, Artificial Sequence
  Cyclic GFR-binding peptide
  MOD_RES (14)..(14): Xaa is C or S
KYLISIPSMKEPVX

SEQ ID NO: 12443 - protein, 25 aa, Artificial Sequence
  Cyclic GFR-binding peptide
  MOD_RES (19)..(20): Xaa is C or S
NSSDDLYLVSIPELKTPAXXPKPVH

SEQ ID NO: 12444 - protein, 18 aa, Artificial Sequence
  Cyclic GFR-binding peptide
VVNKNEDLYLISIPEMKE

SEQ ID NO: 12445 - protein, 18 aa, Artificial Sequence
  Cyclic GFR-binding peptide
  MOD_RES (14)..(15): Xaa is C or S
FYLISIANMKEPVXXPEP

SEQ ID NO: 12446 - protein, 15 aa, Artificial Sequence
  Cyclic GFR-binding peptide
  MOD_RES (14)..(15): Xaa is C or S
KYLISIPSLRTPVXX

SEQ ID NO: 12447 - protein, 22 aa, Artificial Sequence
  Cyclic GFR-binding peptide
  MOD_RES (16)..(17): Xaa is C or S
NDYYLMSTASTKVPAXXTSPVR

SEQ ID NO: 12448 - protein, 21 aa, Artificial Sequence
  Cyclic GFR-binding peptide
  MOD_RES (15)..(16): Xaa is C or S
DYYLISTASLKTPVXXAKSAK

SEQ ID NO: 12449 - protein, 25 aa, Artificial Sequence
  Cyclic GFR-binding peptide
  MOD_RES (19)..(20): Xaa is C or S
QQKDNLYLMSIPEMKTPTXXPGASG

SEQ ID NO: 12450 - protein, 20 aa, Artificial Sequence
  Cyclic GFR-binding peptide
  MOD_RES (14)..(15): Xaa is C or S
YYLMSTASMKTPTXXPGASG

SEQ ID NO: 12451 - protein, 26 aa, Artificial Sequence
  Cyclic GFR-binding peptide
  MOD_RES (20)..(21): Xaa is C or S
VNKNEDLYLISIPEMKEPVXXPEPIG

SEQ ID NO: 12452 - protein, 16 aa, Artificial Sequence
  Cyclic GFR-binding peptide
  MOD_RES (14)..(15): Xaa is C or S
FYLINIPSMKEPVXXP

SEQ ID NO: 12453 - protein, 27 aa, Artificial Sequence
  Cyclic GFR-binding peptide
  MOD_RES (21)..(22): Xaa is C or S
IKPTKGIFYLINIPSLDQSVXXPSASA

SEQ ID NO: 12454 - protein, 15 aa, Artificial Sequence
  Cyclic GFR-binding peptide
VVNKNEDFYLINIPS

SEQ ID NO: 12455 - protein, 23 aa, Artificial Sequence
  Cyclic GFR-binding peptide
  MOD_RES (17)..(18): Xaa is C or S
GNDLYLMSIPETKVPAXXTSPVR

SEQ ID NO: 12456 - protein, 26 aa, Artificial Sequence
  Cyclic GFR-binding peptide
  MOD_RES (20)..(21): Xaa is C or S
VNSSDDYYLVSTASLKTPAXXPKPVH

SEQ ID NO: 12457 - protein, 25 aa, Artificial Sequence
  Cyclic GFR-binding peptide
  MOD_RES (19)..(20): Xaa is C or S
NNAADYYLISTASLRAPVXXSAPAA

SEQ ID NO: 12458 - protein, 25 aa, Artificial Sequence
  Cyclic GFR-binding peptide
  MOD_RES (19)..(20): Xaa is C or S
QQKDNKYLMSIPSMKTPTXXPGASG

SEQ ID NO: 12459 - protein, 13 aa, Artificial Sequence
  Cyclic GFR-binding peptide
KYLMSIPSTKVPA

SEQ ID NO: 12460 - protein, 20 aa, Artificial Sequence
  Cyclic GFR-binding peptide
  MOD_RES (14)..(15): Xaa is C or S
FYLINIPSLAQPVXXPAASA

SEQ ID NO: 12461 - protein, 22 aa, Artificial Sequence
  Cyclic GFR-binding peptide
  MOD_RES (16)..(17): Xaa is C or S
ADYYLISTASLRAPVXXSAPAA

SEQ ID NO: 12462 - protein, 19 aa, Artificial Sequence
  Cyclic GFR-binding peptide
  MOD_RES (14)..(15): Xaa is C or S
KYLMSIPSMKTPTXXPGAS

SEQ ID NO: 12463 - protein, 16 aa, Artificial Sequence
  Cyclic GFR-binding peptide
  MOD_RES (14)..(15): Xaa is C or S
LYLISIPEMKEPVXXP

SEQ ID NO: 12464 - protein, 26 aa, Artificial Sequence
  Cyclic GFR-binding peptide
  MOD_RES (20)..(21): Xaa is C or S
IQQKDNYYLMSTASMKTPTXXPGASG

SEQ ID NO: 12465 - protein, 19 aa, Artificial Sequence
  Cyclic GFR-binding peptide
  MOD_RES (14)..(15): Xaa is C or S
FYLINIPSMKEPVXXPEPI

SEQ ID NO: 12466 - protein, 24 aa, Artificial Sequence
  Cyclic GFR-binding peptide
  MOD_RES (18)..(19): Xaa is C or S
NASDYYLISTASLRTPVXXTPPTS

SEQ ID NO: 12467 - protein, 20 aa, Artificial Sequence
  Cyclic GFR-binding peptide
  MOD_RES (14)..(15): Xaa is C or S
LYLMSIPEMKTPTXXPGASG

SEQ ID NO: 12468 - protein, 25 aa, Artificial Sequence
  Cyclic GFR-binding peptide
  MOD_RES (19)..(20): Xaa is C or S
VRGNDYYLMSTASTKVPAXXTSPVR

SEQ ID NO: 12469 - protein, 18 aa, Artificial Sequence
  Cyclic GFR-binding peptide
LLVRGNDLYLMSIPETKV

SEQ ID NO: 12470 - protein, 18 aa, Artificial Sequence
  Cyclic GFR-binding peptide
  MOD_RES (14)..(15): Xaa is C or S
FYLINIPSLDQPVXXPSA

SEQ ID NO: 12471 - protein, 26 aa, Artificial Sequence
  Cyclic GFR-binding peptide
  MOD_RES (20)..(21): Xaa is C or S
KPTKGIFYLINIPSLDQSVXXPSASA

SEQ ID NO: 12472 - protein, 18 aa, Artificial Sequence
  Cyclic GFR-binding peptide
  MOD_RES (14)..(15): Xaa is C or S
YYLMSTASTKVPAXXTSP

SEQ ID NO: 12473 - protein, 13 aa, Artificial Sequence
  Cyclic GFR-binding peptide
LYLISIPEMKEPV

SEQ ID NO: 12474 - protein, 18 aa, Artificial Sequence
  Cyclic GFR-binding peptide
VVNNAADYYLISTASLRA

SEQ ID NO: 12475 - protein, 25 aa, Artificial Sequence
  Cyclic GFR-binding peptide
  MOD_RES (19)..(20): Xaa is C or S
VRGNDKYLMSIPSTKVPAXXTSPVR

SEQ ID NO: 12476 - protein, 20 aa, Artificial Sequence
  Cyclic GFR-binding peptide
  MOD_RES (14)..(15): Xaa is C or S
YYLVSTASLKTPAXXPKPVH

SEQ ID NO: 12477 - protein, 16 aa, Artificial Sequence
  Cyclic GFR-binding peptide
YTVVGKDYYLISTASL

SEQ ID NO: 12478 - protein, 24 aa, Artificial Sequence
  Cyclic GFR-binding peptide
  MOD_RES (18)..(19): Xaa is C or S
RGNDKYLMSIPSTKVPAXXTSPVR

SEQ ID NO: 12479 - protein, 16 aa, Artificial Sequence
  Cyclic GFR-binding peptide
  MOD_RES (14)..(15): Xaa is C or S
YYLISTASLKTPVXXA

SEQ ID NO: 12480 - protein, 19 aa, Artificial Sequence
  Cyclic GFR-binding peptide
  MOD_RES (14)..(15): Xaa is C or S
YYLMSTASMKTPTXXPGAS

SEQ ID NO: 12481 - protein, 26 aa, Artificial Sequence
  Cyclic GFR-binding peptide
  MOD_RES (20)..(21): Xaa is C or S
KPTRGVFYLINIPSLDQPVXXPSASA

SEQ ID NO: 12482 - protein, 17 aa, Artificial Sequence
  Cyclic GFR-binding peptide
VVNNAADYYLISTASLR

SEQ ID NO: 12483 - protein, 19 aa, Artificial Sequence
  Cyclic GFR-binding peptide
IIQQKDNKYLMSIPSMKTP

SEQ ID NO: 12484 - protein, 15 aa, Artificial Sequence
  Cyclic GFR-binding peptide
  MOD_RES (14)..(15): Xaa is C or S
FYLINIPSLDQSVXX

SEQ ID NO: 12485 - protein, 24 aa, Artificial Sequence
  Cyclic GFR-binding peptide
  MOD_RES (18)..(19): Xaa is C or S
RGNDLYLMSIPETKVPAXXTSPVR

SEQ ID NO: 12486 - protein, 19 aa, Artificial Sequence
  Cyclic GFR-binding peptide
VVNNASDKYLISIPSLRTP

SEQ ID NO: 12487 - protein, 16 aa, Artificial Sequence
  Cyclic GFR-binding peptide
  MOD_RES (14)..(15): Xaa is C or S
FYLINIPSLAQPVXXP

SEQ ID NO: 12488 - protein, 25 aa, Artificial Sequence
  Cyclic GFR-binding peptide
  MOD_RES (19)..(20): Xaa is C or S
QQKDNYYLMSTASMKTPTXXPGASG

SEQ ID NO: 12489 - protein, 18 aa, Artificial Sequence
  Cyclic GFR-binding peptide
YTVVGKDYYLISTASLKT

SEQ ID NO: 12490 - protein, 18 aa, Artificial Sequence
  Cyclic GFR-binding peptide
  MOD_RES (14)..(15): Xaa is C or S
KYLMSIPSTKVPAXXTSP

SEQ ID NO: 12491 - protein, 19 aa, Artificial Sequence
  Cyclic GFR-binding peptide
VVNKNEDFYLISIANMKEP

SEQ ID NO: 12492 - protein, 20 aa, Artificial Sequence
  Cyclic GFR-binding peptide
  MOD_RES (14)..(15): Xaa is C or S
LYLMSIPETKVPAXXTSPVR

SEQ ID NO: 12493 - protein, 22 aa, Artificial Sequence
  Cyclic GFR-binding peptide
  MOD_RES (16)..(17): Xaa is C or S
SDYYLISTASLRTPVXXTPPTS

SEQ ID NO: 12494 - protein, 16 aa, Artificial Sequence
  Cyclic GFR-binding peptide
IKPTKGIFYLINIPSL

SEQ ID NO: 12495 - protein, 16 aa, Artificial Sequence
  Cyclic GFR-binding peptide
  MOD_RES (14)..(15): Xaa is C or S
YYLMSTASTKVPAXXT

SEQ ID NO: 12496 - protein, 25 aa, Artificial Sequence
  Cyclic GFR-binding peptide
  MOD_RES (19)..(20): Xaa is C or S
NNASDKYLISIPSLRTPVXXTPPTS

SEQ ID NO: 12497 - protein, 15 aa, Artificial Sequence
  Cyclic GFR-binding peptide
VVNNASDYYLISTAS

SEQ ID NO: 12498 - protein, 16 aa, Artificial Sequence
  Cyclic GFR-binding peptide
IIQQKDNKYLMSIPSM

SEQ ID NO: 12499 - protein, 21 aa, Artificial Sequence
  Cyclic GFR-binding peptide
  MOD_RES (15)..(16): Xaa is C or S
DYYLISTASLRAPVXXSAPAA

SEQ ID NO: 12500 - protein, 17 aa, Artificial Sequence
  Cyclic GFR-binding peptide
  MOD_RES (14)..(15): Xaa is C or S
YYLMSTASTKVPAXXTS

SEQ ID NO: 12501 - protein, 17 aa, Artificial Sequence
  Cyclic GFR-binding peptide
VVNKNEDFYLINIPSMK

SEQ ID NO: 12502 - protein, 13 aa, Artificial Sequence
  Cyclic GFR-binding peptide
YYLISTASMKEPV

SEQ ID NO: 12503 - protein, 19 aa, Artificial Sequence
  Cyclic GFR-binding peptide
  MOD_RES (14)..(15): Xaa is C or S
LYLMSIPEMKTPTXXPGAS

SEQ ID NO: 12504 - protein, 21 aa, Artificial Sequence
  Cyclic GFR-binding peptide
  MOD_RES (15)..(16): Xaa is C or S
DKYLISIPSMKEPVXXPEPIG

SEQ ID NO: 12505 - protein, 27 aa, Artificial Sequence
  Cyclic GFR-binding peptide
  MOD_RES (21)..(22): Xaa is C or S
VVNKNEDLYLISIPEMKEPVXXPEPIG

SEQ ID NO: 12506 - protein, 13 aa, Artificial Sequence
  Cyclic GFR-binding peptide
LYLMSIPETKVPA

SEQ ID NO: 12507 - protein, 27 aa, Artificial Sequence
  Cyclic GFR-binding peptide
  MOD_RES (21)..(22): Xaa is C or S
IIQQKDNLYLMSIPEMKTPTXXPGASG

SEQ ID NO: 12508 - protein, 16 aa, Artificial Sequence
  Cyclic GFR-binding peptide
  MOD_RES (14)..(15): Xaa is C or S
KYLMSIPSTKVPAXXT

SEQ ID NO: 12509 - protein, 25 aa, Artificial Sequence
  Cyclic GFR-binding peptide
  MOD_RES (19)..(20): Xaa is C or S
NNASDYYLISTASLRTPVXXTPPTS

SEQ ID NO: 12510 - protein, 16 aa, Artificial Sequence
  Cyclic GFR-binding peptide
VKPKRGVFYLINIPSL

SEQ ID NO: 12511 - protein, 13 aa, Artificial Sequence
  Cyclic GFR-binding peptide
YYLISTASLKTPV

SEQ ID NO: 12512 - protein, 17 aa, Artificial Sequence
  Cyclic GFR-binding peptide
  MOD_RES (14)..(15): Xaa is C or S
KYLMSIPSTKVPAXXTS

SEQ ID NO: 12513 - protein, 15 aa, Artificial Sequence
  Cyclic GFR-binding peptide
  MOD_RES (14)..(15): Xaa is C or S
LYLISIPELRTPVXX

SEQ ID NO: 12514 - protein, 17 aa, Artificial Sequence
  Cyclic GFR-binding peptide
VVNKNEDFYLISIANMK

SEQ ID NO: 12515 - protein, 18 aa, Artificial Sequence
  Cyclic GFR-binding peptide
VVNKNEDFYLINIPSMKE

SEQ ID NO: 12516 - protein, 19 aa, Artificial Sequence
  Cyclic GFR-binding peptide
YTVVGKDYYLISTASLKTP

SEQ ID NO: 12517 - protein, 20 aa, Artificial Sequence
  Cyclic GFR-binding peptide
  MOD_RES (14)..(15): Xaa is C or S
KYLMSIPSMKTPTXXPGASG

SEQ ID NO: 12518 - protein, 23 aa, Artificial Sequence
  Cyclic GFR-binding peptide
  MOD_RES (17)..(18): Xaa is C or S
ASDYYLISTASLRTPVXXTPPTS

SEQ ID NO: 12519 - protein, 26 aa, Artificial Sequence
  Cyclic GFR-binding peptide
  MOD_RES (20)..(21): Xaa is C or S
VNNASDYYLISTASLRTPVXXTPPTS

SEQ ID NO: 12520 - protein, 27 aa, Artificial Sequence
  Cyclic GFR-binding peptide
  MOD_RES (21)..(22): Xaa is C or S
VKPTRGVFYLINIPSLDQPVXXPSASA

SEQ ID NO: 12521 - protein, 26 aa, Artificial Sequence
  Cyclic GFR-binding peptide
  MOD_RES (20)..(21): Xaa is C or S
IQQKDNLYLMSIPEMKTPTXXPGASG

SEQ ID NO: 12522 - protein, 18 aa, Artificial Sequence
  Cyclic GFR-binding peptide
VVNNASDYYLISTASLRT

SEQ ID NO: 12523 - protein, 16 aa, Artificial Sequence
  Cyclic GFR-binding peptide
VVNKNEDFYLINIPSM

SEQ ID NO: 12524 - protein, 22 aa, Artificial Sequence
  Cyclic GFR-binding peptide
  MOD_RES (16)..(17): Xaa is C or S
SDKYLISIPSLRTPVXXTPPTS

SEQ ID NO: 12525 - protein, 15 aa, Artificial Sequence
  Cyclic GFR-binding peptide
  MOD_RES (14)..(15): Xaa is C or S
YYLISTASLRAPVXX

SEQ ID NO: 12526 - protein, 18 aa, Artificial Sequence
  Cyclic GFR-binding peptide
LLVRGNDYYLMSTASTKV

SEQ ID NO: 12527 - protein, 22 aa, Artificial Sequence
  Cyclic GFR-binding peptide
  MOD_RES (16)..(17): Xaa is C or S
SDLYLISIPELRTPVXXTPPTS

SEQ ID NO: 12528 - protein, 22 aa, Artificial Sequence
  Cyclic GFR-binding peptide
  MOD_RES (16)..(17): Xaa is C or S
DNKYLMSIPSMKTPTXXPGASG

SEQ ID NO: 12529 - protein, 14 aa, Artificial Sequence
  Cyclic GFR-binding peptide
  MOD_RES (14)..(14): Xaa is C or S
YYLISTASLRAPVX

SEQ ID NO: 12530 - protein, 16 aa, Artificial Sequence
  Cyclic GFR-binding peptide
VKPTRGVFYLINIPSL

SEQ ID NO: 12531 - protein, 23 aa, Artificial Sequence
  Cyclic GFR-binding peptide
  MOD_RES (17)..(18): Xaa is C or S
KGIFYLINIPSLDQSVXXPSASA

SEQ ID NO: 12532 - protein, 20 aa, Artificial Sequence
  Cyclic GFR-binding peptide
  MOD_RES (14)..(15): Xaa is C or S
KYLVSIPSLKTPAXXPKPVH

SEQ ID NO: 12533 - protein, 25 aa, Artificial Sequence
  Cyclic GFR-binding peptide
  MOD_RES (19)..(20): Xaa is C or S
NSSDDYYLVSTASLKTPAXXPKPVH

SEQ ID NO: 12534 - protein, 23 aa, Artificial Sequence
  Cyclic GFR-binding peptide
  MOD_RES (17)..(18): Xaa is C or S
AADYYLISTASLRAPVXXSAPAA

SEQ ID NO: 12535 - protein, 22 aa, Artificial Sequence
  Cyclic GFR-binding peptide
  MOD_RES (16)..(17): Xaa is C or S
DNLYLMSIPEMKTPTXXPGASG

SEQ ID NO: 12536 - protein, 15 aa, Artificial Sequence
  Cyclic GFR-binding peptide
LLVRGNDYYLMSTAS

SEQ ID NO: 12537 - protein, 18 aa, Artificial Sequence
  Cyclic GFR-binding peptide
IIQQKDNYYLMSTASMKT

SEQ ID NO: 12538 - protein, 14 aa, Artificial Sequence
  Cyclic GFR-binding peptide
  MOD_RES (14)..(14): Xaa is C or S
FYLINIPSLAQPVX

SEQ ID NO: 12539 - protein, 17 aa, Artificial Sequence
  Cyclic GFR-binding peptide
  MOD_RES (14)..(15): Xaa is C or S
YYLISTASLRTPVXXTP

SEQ ID NO: 12540 - protein, 27 aa, Artificial Sequence
  Cyclic GFR-binding peptide
  MOD_RES (21)..(22): Xaa is C or S
LLVRGNDLYLMSIPETKVPAXXTSPVR

SEQ ID NO: 12541 - protein, 22 aa, Artificial Sequence
  Cyclic GFR-binding peptide
  MOD_RES (16)..(17): Xaa is C or S
EDFYLINIPSMKEPVXXPEPIG

SEQ ID NO: 12542 - protein, 18 aa, Artificial Sequence
  Cyclic GFR-binding peptide
  MOD_RES (14)..(15): Xaa is C or S
FYLINIPSLDQSVXXPSA

SEQ ID NO: 12543 - protein, 18 aa, Artificial Sequence
  Cyclic GFR-binding peptide
  MOD_RES (14)..(15): Xaa is C or S
KYLISIPSLRTPVXXTPP

SEQ ID NO: 12544 - protein, 16 aa, Artificial Sequence
  Cyclic GFR-binding peptide
LLVRGNDKYLMSIPST

SEQ ID NO: 12545 - protein, 25 aa, Artificial Sequence
  Cyclic GFR-binding peptide
  MOD_RES (19)..(20): Xaa is C or S
PKRGVFYLINIPSLAQPVXXPAASA

SEQ ID NO: 12546 - protein, 27 aa, Artificial Sequence
  Cyclic GFR-binding peptide
  MOD_RES (21)..(22): Xaa is C or S
IIQQKDNYYLMSTASMKTPTXXPGASG

SEQ ID NO: 12547 - protein, 16 aa, Artificial Sequence
  Cyclic GFR-binding peptide
  MOD_RES (14)..(15): Xaa is C or S
FYLISIANMKEPVXXP

SEQ ID NO: 12548 - protein, 27 aa, Artificial Sequence
  Cyclic GFR-binding peptide
  MOD_RES (21)..(22): Xaa is C or S
IVNSSDDLYLVSIPELKTPAXXPKPVH

SEQ ID NO: 12549 - protein, 20 aa, Artificial Sequence
  Cyclic GFR-binding peptide
  MOD_RES (14)..(15): Xaa is C or S
KYLISIPSLRTPVXXTPPTS

SEQ ID NO: 12550 - protein, 22 aa, Artificial Sequence
  Cyclic GFR-binding peptide
  MOD_RES (16)..(17): Xaa is C or S
EDKYLISIPSMKEPVXXPEPIG

SEQ ID NO: 12551 - protein, 15 aa, Artificial Sequence
  Cyclic GFR-binding peptide
VKPKRGVFYLINIPS

SEQ ID NO: 12552 - protein, 14 aa, Artificial Sequence
  Cyclic GFR-binding peptide
  MOD_RES (14)..(14): Xaa is C or S
FYLINIPSLDQSVX

SEQ ID NO: 12553 - protein, 27 aa, Artificial Sequence
  Cyclic GFR-binding peptide
  MOD_RES (21)..(22): Xaa is C or S
VVNKNEDYYLISTASMKEPVXXPEPIG

SEQ ID NO: 12554 - protein, 23 aa, Artificial Sequence
  Cyclic GFR-binding peptide
  MOD_RES (17)..(18): Xaa is C or S
ASDLYLISIPELRTPVXXTPPTS

SEQ ID NO: 12555 - protein, 21 aa, Artificial Sequence
  Cyclic GFR-binding peptide
  MOD_RES (15)..(16): Xaa is C or S
DLYLMSIPETKVPAXXTSPVR

SEQ ID NO: 12556 - protein, 17 aa, Artificial Sequence
  Cyclic GFR-binding peptide
VVNKNEDYYLISTASMK

SEQ ID NO: 12557 - protein, 16 aa, Artificial Sequence
  Cyclic GFR-binding peptide
LLVRGNDLYLMSIPET

SEQ ID NO: 12558 - protein, 22 aa, Artificial Sequence
  Cyclic GFR-binding peptide
  MOD_RES (16)..(17): Xaa is C or S
EDLYLISIPEMKEPVXXPEPIG

SEQ ID NO: 12559 - protein, 17 aa, Artificial Sequence
  Cyclic GFR-binding peptide
  MOD_RES (14)..(15): Xaa is C or S
YYLISTASLRAPVXXSA

SEQ ID NO: 12560 - protein, 22 aa, Artificial Sequence
  Cyclic GFR-binding peptide
  MOD_RES (16)..(17): Xaa is C or S
GVFYLINIPSLAQPVXXPAASA

SEQ ID NO: 12561 - protein, 21 aa, Artificial Sequence
  Cyclic GFR-binding peptide
  MOD_RES (15)..(16): Xaa is C or S
DYYLISTASLRTPVXXTPPTS

SEQ ID NO: 12562 - protein, 27 aa, Artificial Sequence
  Cyclic GFR-binding peptide
  MOD_RES (21)..(22): Xaa is C or S
VVNNASDLYLISIPELRTPVXXTPPTS

SEQ ID NO: 12563 - protein, 19 aa, Artificial Sequence
  Cyclic GFR-binding peptide
  MOD_RES (14)..(15): Xaa is C or S
FYLINIPSLDQSVXXPSAS

SEQ ID NO: 12564 - protein, 21 aa, Artificial Sequence
  Cyclic GFR-binding peptide
  MOD_RES (15)..(16): Xaa is C or S
DLYLISIPELRTPVXXTPPTS

SEQ ID NO: 12565 - protein, 26 aa, Artificial Sequence
  Cyclic GFR-binding peptide
  MOD_RES (20)..(21): Xaa is C or S
VNNASDLYLISIPELRTPVXXTPPTS

SEQ ID NO: 12566 - protein, 18 aa, Artificial Sequence
  Cyclic GFR-binding peptide
VVNKNEDFYLISIANMKE

SEQ ID NO: 12567 - protein, 20 aa, Artificial Sequence
  Cyclic GFR-binding peptide
  MOD_RES (14)..(15): Xaa is C or S
FYLISIANMKEPVXXPEPIG

SEQ ID NO: 12568 - protein, 17 aa, Artificial Sequence
  Cyclic GFR-binding peptide
  MOD_RES (14)..(15): Xaa is C or S
KYLISIPSMKEPVXXPE

SEQ ID NO: 12569 - protein, 19 aa, Artificial Sequence
  Cyclic GFR-binding peptide
VVNKNEDYYLISTASMKEP

SEQ ID NO: 12570 - protein, 13 aa, Artificial Sequence
  Cyclic GFR-binding peptide
FYLINIPSLAQPV

SEQ ID NO: 12571 - protein, 16 aa, Artificial Sequence
  Cyclic GFR-binding peptide
VVNNASDLYLISIPEL

SEQ ID NO: 12572 - protein, 15 aa, Artificial Sequence
  Cyclic GFR-binding peptide
IKPTKGIFYLINIPS

SEQ ID NO: 12573 - protein, 16 aa, Artificial Sequence
  Cyclic GFR-binding peptide
VVNKNEDKYLISIPSM

SEQ ID NO: 12574 - protein, 21 aa, Artificial Sequence
  Cyclic GFR-binding peptide
  MOD_RES (15)..(16): Xaa is C or S
DYYLMSTASTKVPAXXTSPVR

SEQ ID NO: 12575 - protein, 18 aa, Artificial Sequence
  Cyclic GFR-binding peptide
IKPTKGIFYLINIPSLDQ

SEQ ID NO: 12576 - protein, 26 aa, Artificial Sequence
  Cyclic GFR-binding peptide
  MOD_RES (20)..(21): Xaa is C or S
VNSSDDLYLVSIPELKTPAXXPKPVH

SEQ ID NO: 12577 - protein, 26 aa, Artificial Sequence
  Cyclic GFR-binding peptide
  MOD_RES (20)..(21): Xaa is C or S
VNNAADYYLISTASLRAPVXXSAPAA

SEQ ID NO: 12578 - protein, 17 aa, Artificial Sequence
  Cyclic GFR-binding peptide
  MOD_RES (14)..(15): Xaa is C or S
LYLISIPELRTPVXXTP

SEQ ID NO: 12579 - protein, 13 aa, Artificial Sequence
  Cyclic GFR-binding peptide
KYLMSIPSMKTPT

SEQ ID NO: 12580 - protein, 25 aa, Artificial Sequence
  Cyclic GFR-binding peptide
  MOD_RES (19)..(20): Xaa is C or S
PTKGIFYLINIPSLDQSVXXPSASA

SEQ ID NO: 12581 - protein, 26 aa, Artificial Sequence
  Cyclic GFR-binding peptide
  MOD_RES (20)..(21): Xaa is C or S
VNKNEDFYLINIPSMKEPVXXPEPIG

SEQ ID NO: 12582 - protein, 13 aa, Artificial Sequence
  Cyclic GFR-binding peptide
FYLINIPSLDQSV

SEQ ID NO: 12583 - protein, 19 aa, Artificial Sequence
  Cyclic GFR-binding peptide
LLVRGNDLYLMSIPETKVP

SEQ ID NO: 12584 - protein, 22 aa, Artificial Sequence
  Cyclic GFR-binding peptide
  MOD_RES (16)..(17): Xaa is C or S
KDYYLISTASLKTPVXXAKSAK

SEQ ID NO: 12585 - protein, 22 aa, Artificial Sequence
  Cyclic GFR-binding peptide
  MOD_RES (16)..(17): Xaa is C or S
EDFYLISIANMKEPVXXPEPIG

SEQ ID NO: 12586 - protein, 27 aa, Artificial Sequence
  Cyclic GFR-binding peptide
  MOD_RES (21)..(22): Xaa is C or S
LLVRGNDKYLMSIPSTKVPAXXTSPVR

SEQ ID NO: 12587 - protein, 26 aa, Artificial Sequence
  Cyclic GFR-binding peptide
  MOD_RES (20)..(21): Xaa is C or S
LVRGNDLYLMSIPETKVPAXXTSPVR

SEQ ID NO: 12588 - protein, 19 aa, Artificial Sequence
  Cyclic GFR-binding peptide
  MOD_RES (14)..(15): Xaa is C or S
FYLISIANMKEPVXXPEPI

SEQ ID NO: 12589 - protein, 19 aa, Artificial Sequence
  Cyclic GFR-binding peptide
IKPTKGIFYLINIPSLDQS

SEQ ID NO: 12590 - protein, 18 aa, Artificial Sequence
  Cyclic GFR-binding peptide
  MOD_RES (14)..(15): Xaa is C or S
KYLISIPSMKEPVXXPEP

SEQ ID NO: 12591 - protein, 14 aa, Artificial Sequence
  Cyclic GFR-binding peptide
  MOD_RES (14)..(14): Xaa is C or S
YYLISTASLKTPVX

SEQ ID NO: 12592 - protein, 25 aa, Artificial Sequence
  Cyclic GFR-binding peptide
  MOD_RES (19)..(20): Xaa is C or S
VRGNDLYLMSIPETKVPAXXTSPVR

SEQ ID NO: 12593 - protein, 27 aa, Artificial Sequence
  Cyclic GFR-binding peptide
  MOD_RES (21)..(22): Xaa is C or S
IVNSSDDKYLVSIPSLKTPAXXPKPVH

SEQ ID NO: 12594 - protein, 17 aa, Artificial Sequence
  Cyclic GFR-binding peptide
  MOD_RES (14)..(15): Xaa is C or S
YYLISTASMKEPVXXPE

SEQ ID NO: 12595 - protein, 14 aa, Artificial Sequence
  Cyclic GFR-binding peptide
  MOD_RES (14)..(14): Xaa is C or S
FYLISIANMKEPVX

SEQ ID NO: 12596 - protein, 17 aa, Artificial Sequence
  Cyclic GFR-binding peptide
  MOD_RES (14)..(15): Xaa is C or S
YYLISTASLKTPVXXAK

SEQ ID NO: 12597 - protein, 13 aa, Artificial Sequence
  Cyclic GFR-binding peptide
YYLISTASLRAPV

SEQ ID NO: 12598 - protein, 23 aa, Artificial Sequence
  Cyclic GFR-binding peptide
  MOD_RES (17)..(18): Xaa is C or S
RGVFYLINIPSLDQPVXXPSASA

SEQ ID NO: 12599 - protein, 19 aa, Artificial Sequence
  Cyclic GFR-binding peptide
  MOD_RES (14)..(15): Xaa is C or S
LYLISIPEMKEPVXXPEPI

SEQ ID NO: 12600 - protein, 24 aa, Artificial Sequence
  Cyclic GFR-binding peptide
  MOD_RES (18)..(19): Xaa is C or S
KNEDKYLISIPSMKEPVXXPEPIG

SEQ ID NO: 12601 - protein, 16 aa, Artificial Sequence
  Cyclic GFR-binding peptide
  MOD_RES (14)..(15): Xaa is C or S
KYLISIPSLRTPVXXT

SEQ ID NO: 12602 - protein, 16 aa, Artificial Sequence
  Cyclic GFR-binding peptide
VVNKNEDFYLISIANM

SEQ ID NO: 12603 - protein, 23 aa, Artificial Sequence
  Cyclic GFR-binding peptide
  MOD_RES (17)..(18): Xaa is C or S
SDDYYLVSTASLKTPAXXPKPVH

SEQ ID NO: 12604 - protein, 24 aa, Artificial Sequence
  Cyclic GFR-binding peptide
  MOD_RES (18)..(19): Xaa is C or S
NASDKYLISIPSLRTPVXXTPPTS

SEQ ID NO: 12605 - protein, 24 aa, Artificial Sequence
  Cyclic GFR-binding peptide
  MOD_RES (18)..(19): Xaa is C or S
TRGVFYLINIPSLDQPVXXPSASA

SEQ ID NO: 12606 - protein, 15 aa, Artificial Sequence
  Cyclic GFR-binding peptide
  MOD_RES (14)..(15): Xaa is C or S
YYLISTASLKTPVXX

SEQ ID NO: 12607 - protein, 25 aa, Artificial Sequence
  Cyclic GFR-binding peptide
  MOD_RES (19)..(20): Xaa is C or S
NKNEDFYLISIANMKEPVXXPEPIG

SEQ ID NO: 12608 - protein, 17 aa, Artificial Sequence
  Cyclic GFR-binding peptide
LLVRGNDYYLMSTASTK

SEQ ID NO: 12609 - protein, 16 aa, Artificial Sequence
  Cyclic GFR-binding peptide
  MOD_RES (14)..(15): Xaa is C or S
LYLMSIPEMKTPTXXP

SEQ ID NO: 12610 - protein, 20 aa, Artificial Sequence
  Cyclic GFR-binding peptide
  MOD_RES (14)..(15): Xaa is C or S
YYLISTASLKTPVXXAKSAK

SEQ ID NO: 12611 - protein, 24 aa, Artificial Sequence
  Cyclic GFR-binding peptide
  MOD_RES (18)..(19): Xaa is C or S
VGKDYYLISTASLKTPVXXAKSAK

SEQ ID NO: 12612 - protein, 23 aa, Artificial Sequence
  Cyclic GFR-binding peptide
  MOD_RES (17)..(18): Xaa is C or S
SDDKYLVSIPSLKTPAXXPKPVH

SEQ ID NO: 12613 - protein, 19 aa, Artificial Sequence
  Cyclic GFR-binding peptide
  MOD_RES (14)..(15): Xaa is C or S
YYLISTASMKEPVXXPEPI

SEQ ID NO: 12614 - protein, 18 aa, Artificial Sequence
  Cyclic GFR-binding peptide
  MOD_RES (14)..(15): Xaa is C or S
YYLISTASLRTPVXXTPP

SEQ ID NO: 12615 - protein, 22 aa, Artificial Sequence
  Cyclic GFR-binding peptide
  MOD_RES (16)..(17): Xaa is C or S
EDYYLISTASMKEPVXXPEPIG

SEQ ID NO: 12616 - protein, 17 aa, Artificial Sequence
  Cyclic GFR-binding peptide
IKPTKGIFYLINIPSLD

SEQ ID NO: 12617 - protein, 17 aa, Artificial Sequence
  Cyclic GFR-binding peptide
  MOD_RES (14)..(15): Xaa is C or S
LYLISIPEMKEPVXXPE

SEQ ID NO: 12618 - protein, 26 aa, Artificial Sequence
  Cyclic GFR-binding peptide
  MOD_RES (20)..(21): Xaa is C or S
VNSSDDKYLVSIPSLKTPAXXPKPVH

SEQ ID NO: 12619 - protein, 19 aa, Artificial Sequence
  Cyclic GFR-binding peptide
VKPKRGVFYLINIPSLAQP

SEQ ID NO: 12620 - protein, 26 aa, Artificial Sequence
  Cyclic GFR-binding peptide
  MOD_RES (20)..(21): Xaa is C or S
KPKRGVFYLINIPSLAQPVXXPAASA

SEQ ID NO: 12621 - protein, 17 aa, Artificial Sequence
  Cyclic GFR-binding peptide
IIQQKDNKYLMSIPSMK

SEQ ID NO: 12622 - protein, 17 aa, Artificial Sequence
  Cyclic GFR-binding peptide
VVNNASDLYLISIPELR

SEQ ID NO: 12623 - protein, 18 aa, Artificial Sequence
  Cyclic GFR-binding peptide
VKPTRGVFYLINIPSLDQ

SEQ ID NO: 12624 - protein, 17 aa, Artificial Sequence
  Cyclic GFR-binding peptide
  MOD_RES (14)..(15): Xaa is C or S
KYLMSIPSMKTPTXXPG

SEQ ID NO: 12625 - protein, 20 aa, Artificial Sequence
  Cyclic GFR-binding peptide
  MOD_RES (14)..(15): Xaa is C or S
LYLISIPEMKEPVXXPEPIG

SEQ ID NO: 12626 - protein, 19 aa, Artificial Sequence
  Cyclic GFR-binding peptide
  MOD_RES (14)..(15): Xaa is C or S
KYLISIPSLRTPVXXTPPT

SEQ ID NO: 12627 - protein, 25 aa, Artificial Sequence
  Cyclic GFR-binding peptide
  MOD_RES (19)..(20): Xaa is C or S
NKNEDKYLISIPSMKEPVXXPEPIG

SEQ ID NO: 12628 - protein, 17 aa, Artificial Sequence
  Cyclic GFR-binding peptide
IIQQKDNLYLMSIPEMK

SEQ ID NO: 12629 - protein, 17 aa, Artificial Sequence
  Cyclic GFR-binding peptide
VKPKRGVFYLINIPSLA

SEQ ID NO: 12630 - protein, 17 aa, Artificial Sequence
  Cyclic GFR-binding peptide
VVNNASDKYLISIPSLR

SEQ ID NO: 12631 - protein, 24 aa, Artificial Sequence
  Cyclic GFR-binding peptide
  MOD_RES (18)..(19): Xaa is C or S
SSDDKYLVSIPSLKTPAXXPKPVH

SEQ ID NO: 12632 - protein, 13 aa, Artificial Sequence
  Cyclic GFR-binding peptide
FYLISIANMKEPV

SEQ ID NO: 12633 - protein, 20 aa, Artificial Sequence
  Cyclic GFR-binding peptide
  MOD_RES (14)..(15): Xaa is C or S
YYLISTASLRTPVXXTPPTS

SEQ ID NO: 12634 - protein, 15 aa, Artificial Sequence
  Cyclic GFR-binding peptide
VVNKNEDYYLISTAS

SEQ ID NO: 12635 - protein, 23 aa, Artificial Sequence
  Cyclic GFR-binding peptide
  MOD_RES (17)..(18): Xaa is C or S
SDDLYLVSIPELKTPAXXPKPVH

SEQ ID NO: 12636 - protein, 23 aa, Artificial Sequence
  Cyclic GFR-binding peptide
  MOD_RES (17)..(18): Xaa is C or S
NEDKYLISIPSMKEPVXXPEPIG

SEQ ID NO: 12637 - protein, 16 aa, Artificial Sequence
  Cyclic GFR-binding peptide
IIQQKDNLYLMSIPEM

SEQ ID NO: 12638 - protein, 26 aa, Artificial Sequence
  Cyclic GFR-binding peptide
  MOD_RES (20)..(21): Xaa is C or S
LVRGNDYYLMSTASTKVPAXXTSPVR

SEQ ID NO: 12639 - protein, 17 aa, Artificial Sequence
  Cyclic GFR-binding peptide
  MOD_RES (14)..(15): Xaa is C or S
FYLINIPSMKEPVXXPE

SEQ ID NO: 12640 - protein, 19 aa, Artificial Sequence
  Cyclic GFR-binding peptide
IIQQKDNLYLMSIPEMKTP

SEQ ID NO: 12641 - protein, 24 aa, Artificial Sequence
  Cyclic GFR-binding peptide
  MOD_RES (18)..(19): Xaa is C or S
SSDDLYLVSIPELKTPAXXPKPVH

SEQ ID NO: 12642 - protein, 21 aa, Artificial Sequence
  Cyclic GFR-binding peptide
  MOD_RES (15)..(16): Xaa is C or S
NLYLMSIPEMKTPTXXPGASG

SEQ ID NO: 12643 - protein, 13 aa, Artificial Sequence
  Cyclic GFR-binding peptide
KYLISIPSLRTPV

SEQ ID NO: 12644 - protein, 15 aa, Artificial Sequence
  Cyclic GFR-binding peptide
VVNNAADYYLISTAS

SEQ ID NO: 12645 - protein, 19 aa, Artificial Sequence
  Cyclic GFR-binding peptide
  MOD_RES (14)..(15): Xaa is C or S
YYLISTASLKTPVXXAKSA

SEQ ID NO: 12646 - protein, 24 aa, Artificial Sequence
  Cyclic GFR-binding peptide
  MOD_RES (18)..(19): Xaa is C or S
QKDNYYLMSTASMKTPTXXPGASG

SEQ ID NO: 12647 - protein, 18 aa, Artificial Sequence
  Cyclic GFR-binding peptide
VVNKNEDKYLISIPSMKE

SEQ ID NO: 12648 - protein, 25 aa, Artificial Sequence
  Cyclic GFR-binding peptide
  MOD_RES (19)..(20): Xaa is C or S
NSSDDKYLVSIPSLKTPAXXPKPVH

SEQ ID NO: 12649 - protein, 19 aa, Artificial Sequence
  Cyclic GFR-binding peptide
VVNNASDLYLISIPELRTP

SEQ ID NO: 12650 - protein, 17 aa, Artificial Sequence
  Cyclic GFR-binding peptide
  MOD_RES (14)..(15): Xaa is C or S
KYLISIPSLRTPVXXTP

SEQ ID NO: 12651 - protein, 15 aa, Artificial Sequence
  Cyclic GFR-binding peptide
  MOD_RES (14)..(15): Xaa is C or S
YYLMSTASMKTPTXX

SEQ ID NO: 12652 - protein, 17 aa, Artificial Sequence
  Cyclic GFR-binding peptide
VVNNASDYYLISTASLR

SEQ ID NO: 12653 - protein, 23 aa, Artificial Sequence
  Cyclic GFR-binding peptide
  MOD_RES (17)..(18): Xaa is C or S
GNDKYLMSIPSTKVPAXXTSPVR

SEQ ID NO: 12654 - protein, 23 aa, Artificial Sequence
  Cyclic GFR-binding peptide
  MOD_RES (17)..(18): Xaa is C or S
NEDYYLISTASMKEPVXXPEPIG

SEQ ID NO: 12655 - protein, 15 aa, Artificial Sequence
  Cyclic GFR-binding peptide
  MOD_RES (14)..(15): Xaa is C or S
FYLINIPSLAQPVXX

SEQ ID NO: 12656 - protein, 19 aa, Artificial Sequence
  Cyclic GFR-binding peptide
LLVRGNDKYLMSIPSTKVP

SEQ ID NO: 12657 - protein, 27 aa, Artificial Sequence
  Cyclic GFR-binding peptide
  MOD_RES (21)..(22): Xaa is C or S
VKPKRGVFYLINIPSLAQPVXXPAASA

SEQ ID NO: 12658 - protein, 24 aa, Artificial Sequence
  Cyclic GFR-binding peptide
  MOD_RES (18)..(19): Xaa is C or S
SSDDYYLVSTASLKTPAXXPKPVH

SEQ ID NO: 12659 - protein, 17 aa, Artificial Sequence
  Cyclic GFR-binding peptide
VVNKNEDKYLISIPSMK

SEQ ID NO: 12660 - protein, 18 aa, Artificial Sequence
  Cyclic GFR-binding peptide
  MOD_RES (14)..(15): Xaa is C or S
YYLISTASLRAPVXXSAP

SEQ ID NO: 12661 - protein, 18 aa, Artificial Sequence
  Cyclic GFR-binding peptide
VVNNASDLYLISIPELRT

SEQ ID NO: 12662 - protein, 18 aa, Artificial Sequence
  Cyclic GFR-binding peptide
  MOD_RES (14)..(15): Xaa is C or S
FYLINIPSLAQPVXXPAA

SEQ ID NO: 12663 - protein, 15 aa, Artificial Sequence
  Cyclic GFR-binding peptide
  MOD_RES (14)..(15): Xaa is C or S
FYLINIPSMKEPVXX

SEQ ID NO: 12664 - protein, 25 aa, Artificial Sequence
  Cyclic GFR-binding peptide
  MOD_RES (19)..(20): Xaa is C or S
NKNEDLYLISIPEMKEPVXXPEPIG

SEQ ID NO: 12665 - protein, 23 aa, Artificial Sequence
  Cyclic GFR-binding peptide
  MOD_RES (17)..(18): Xaa is C or S
ASDKYLISIPSLRTPVXXTPPTS

SEQ ID NO: 12666 - protein, 26 aa, Artificial Sequence
  Cyclic GFR-binding peptide
  MOD_RES (20)..(21): Xaa is C or S
VNKNEDYYLISTASMKEPVXXPEPIG

SEQ ID NO: 12667 - protein, 18 aa, Artificial Sequence
  Cyclic GFR-binding peptide
IIQQKDNLYLMSIPEMKT

SEQ ID NO: 12668 - protein, 17 aa, Artificial Sequence
  Cyclic GFR-binding peptide
LLVRGNDKYLMSIPSTK

SEQ ID NO: 12669 - protein, 20 aa, Artificial Sequence
  Cyclic GFR-binding peptide
  MOD_RES (14)..(15): Xaa is C or S
KYLISIPSMKEPVXXPEPIG

SEQ ID NO: 12670 - protein, 27 aa, Artificial Sequence
  Cyclic GFR-binding peptide
  MOD_RES (21)..(22): Xaa is C or S
VVNNASDKYLISIPSLRTPVXXTPPTS

SEQ ID NO: 12671 - protein, 23 aa, Artificial Sequence
  Cyclic GFR-binding peptide
  MOD_RES (17)..(18): Xaa is C or S
GKDYYLISTASLKTPVXXAKSAK

SEQ ID NO: 12672 - protein, 17 aa, Artificial Sequence
  Cyclic GFR-binding peptide
IIQQKDNYYLMSTASMK

SEQ ID NO: 12673 - protein, 21 aa, Artificial Sequence
  Cyclic GFR-binding peptide
  MOD_RES (15)..(16): Xaa is C or S
VFYLINIPSLDQPVXXPSASA

SEQ ID NO: 12674 - protein, 24 aa, Artificial Sequence
  Cyclic GFR-binding peptide
  MOD_RES (18)..(19): Xaa is C or S
QKDNLYLMSIPEMKTPTXXPGASG

SEQ ID NO: 12675 - protein, 24 aa, Artificial Sequence
  Cyclic GFR-binding peptide
  MOD_RES (18)..(19): Xaa is C or S
QKDNKYLMSIPSMKTPTXXPGASG

SEQ ID NO: 12676 - protein, 27 aa, Artificial Sequence
  Cyclic GFR-binding peptide
  MOD_RES (21)..(22): Xaa is C or S
LLVRGNDYYLMSTASTKVPAXXTSPVR

SEQ ID NO: 12677 - protein, 23 aa, Artificial Sequence
  Cyclic GFR-binding peptide
  MOD_RES (17)..(18): Xaa is C or S
GNDYYLMSTASTKVPAXXTSPVR

SEQ ID NO: 12678 - protein, 23 aa, Artificial Sequence
  Cyclic GFR-binding peptide
  MOD_RES (17)..(18): Xaa is C or S
RGVFYLINIPSLAQPVXXPAASA

SEQ ID NO: 12679 - protein, 18 aa, Artificial Sequence
  Cyclic GFR-binding peptide
VKPKRGVFYLINIPSLAQ

SEQ ID NO: 12680 - protein, 16 aa, Artificial Sequence
  Cyclic GFR-binding peptide
VVNKNEDLYLISIPEM

SEQ ID NO: 12681 - protein, 14 aa, Artificial Sequence
  Cyclic GFR-binding peptide
  MOD_RES (14)..(14): Xaa is C or S
YYLMSTASMKTPTX

SEQ ID NO: 12682 - protein, 15 aa, Artificial Sequence
  Cyclic GFR-binding peptide
  MOD_RES (14)..(15): Xaa is C or S
KYLMSIPSMKTPTXX

SEQ ID NO: 12683 - protein, 16 aa, Artificial Sequence
  Cyclic GFR-binding peptide
  MOD_RES (14)..(15): Xaa is C or S
FYLINIPSLDQSVXXP

SEQ ID NO: 12684 - protein, 27 aa, Artificial Sequence
  Cyclic GFR-binding peptide
  MOD_RES (21)..(22): Xaa is C or S
IVNSSDDYYLVSTASLKTPAXXPKPVH

SEQ ID NO: 12685 - protein, 23 aa, Artificial Sequence
  Cyclic GFR-binding peptide
  MOD_RES (17)..(18): Xaa is C or S
KDNYYLMSTASMKTPTXXPGASG

SEQ ID NO: 12686 - protein, 21 aa, Artificial Sequence
  Cyclic GFR-binding peptide
  MOD_RES (15)..(16): Xaa is C or S
DKYLMSIPSTKVPAXXTSPVR

SEQ ID NO: 12687 - protein, 23 aa, Artificial Sequence
  Cyclic GFR-binding peptide
  MOD_RES (17)..(18): Xaa is C or S
KDNKYLMSIPSMKTPTXXPGASG

SEQ ID NO: 12688 - protein, 16 aa, Artificial Sequence
  Cyclic GFR-binding peptide
VVNNASDKYLISIPSL

SEQ ID NO: 12689 - protein, 24 aa, Artificial Sequence
  Cyclic GFR-binding peptide
  MOD_RES (18)..(19): Xaa is C or S
NAADYYLISTASLRAPVXXSAPAA

SEQ ID NO: 12690 - protein, 15 aa, Artificial Sequence
  Cyclic GFR-binding peptide
VVNKNEDKYLISIPS

SEQ ID NO: 12691 - protein, 19 aa, Artificial Sequence
  Cyclic GFR-binding peptide
VVNKNEDKYLISIPSMKEP

SEQ ID NO: 12692 - protein, 21 aa, Artificial Sequence
  Cyclic GFR-binding peptide
  MOD_RES (15)..(16): Xaa is C or S
DFYLISIANMKEPVXXPEPIG

SEQ ID NO: 12693 - protein, 21 aa, Artificial Sequence
  Cyclic GFR-binding peptide
  MOD_RES (15)..(16): Xaa is C or S
DLYLVSIPELKTPAXXPKPVH

SEQ ID NO: 12694 - protein, 17 aa, Artificial Sequence
  Cyclic GFR-binding peptide
  MOD_RES (14)..(15): Xaa is C or S
FYLINIPSLDQSVXXPS

SEQ ID NO: 12695 - protein, 16 aa, Artificial Sequence
  Cyclic GFR-binding peptide
LLVRGNDYYLMSTAST

SEQ ID NO: 12696 - protein, 20 aa, Artificial Sequence
  Cyclic GFR-binding peptide
  MOD_RES (14)..(15): Xaa is C or S
FYLINIPSLDQPVXXPSASA

SEQ ID NO: 12697 - protein, 15 aa, Artificial Sequence
  Cyclic GFR-binding peptide
IIQQKDNYYLMSTAS

SEQ ID NO: 12698 - protein, 19 aa, Artificial Sequence
  Cyclic GFR-binding peptide
  MOD_RES (14)..(15): Xaa is C or S
FYLINIPSLAQPVXXPAAS

SEQ ID NO: 12699 - protein, 22 aa, Artificial Sequence
  Cyclic GFR-binding peptide
  MOD_RES (16)..(17): Xaa is C or S
GIFYLINIPSLDQSVXXPSASA

SEQ ID NO: 12700 - protein, 14 aa, Artificial Sequence
  Cyclic GFR-binding peptide
  MOD_RES (14)..(14): Xaa is C or S
KYLMSIPSMKTPTX

SEQ ID NO: 12701 - protein, 21 aa, Artificial Sequence
  Cyclic GFR-binding peptide
  MOD_RES (15)..(16): Xaa is C or S
IFYLINIPSLDQSVXXPSASA

SEQ ID NO: 12702 - protein, 14 aa, Artificial Sequence
  Cyclic GFR-binding peptide
  MOD_RES (14)..(14): Xaa is C or S
FYLINIPSMKEPVX

SEQ ID NO: 12703 - protein, 16 aa, Artificial Sequence
  Cyclic GFR-binding peptide
LSATSILYYDSANNVV

SEQ ID NO: 12704 - protein, 13 aa, Artificial Sequence
  Cyclic GFR-binding peptide
VPTRLSATSILYY

SEQ ID NO: 12705 - protein, 24 aa, Artificial Sequence
  Cyclic GFR-binding peptide
  MOD_RES (6)..(7): Xaa is C or S
GIPEPXXVPEKMSPINILYFDENK

SEQ ID NO: 12706 - protein, 14 aa, Artificial Sequence
  Cyclic GFR-binding peptide
  MOD_RES (1)..(1): Xaa is C or S
XVPEKMSATSILYY

SEQ ID NO: 12707 - protein, 18 aa, Artificial Sequence
  Cyclic GFR-binding peptide
  MOD_RES (4)..(5): Xaa is C or S
PEPXXVPEKMSPINILYF

SEQ ID NO: 12708 - protein, 19 aa, Artificial Sequence
  Cyclic GFR-binding peptide
  MOD_RES (5)..(6): Xaa is C or S
VPSTXXAPVKTSATSMLYY

SEQ ID NO: 12709 - protein, 21 aa, Artificial Sequence
  Cyclic GFR-binding peptide
  MOD_RES (6)..(7): Xaa is C or S
GIPEPXXVPEKMEPISILYLD

SEQ ID NO: 12710 - protein, 16 aa, Artificial Sequence
  Cyclic GFR-binding peptide
  MOD_RES (2)..(3): Xaa is C or S
PXXVPEKMSPISILYK

SEQ ID NO: 12711 - protein, 15 aa, Artificial Sequence
  Cyclic GFR-binding peptide
SPISMLYKNDKQQII

SEQ ID NO: 12712 - protein, 27 aa, Artificial Sequence
  Cyclic GFR-binding peptide
  MOD_RES (6)..(7): Xaa is C or S
GSAGPXXTPTKMSPISMLYKNDKQQII

SEQ ID NO: 12713 - protein, 24 aa, Artificial Sequence
  Cyclic GFR-binding peptide
  MOD_RES (6)..(7): Xaa is C or S
STPPTXXVPTRLEPISILYLDSAN

SEQ ID NO: 12714 - protein, 27 aa, Artificial Sequence
  Cyclic GFR-binding peptide
  MOD_RES (6)..(7): Xaa is C or S
GIPEPXXVPEKMSPISILYKDENKNVV

SEQ ID NO: 12715 - protein, 24 aa, Artificial Sequence
  Cyclic GFR-binding peptide
  MOD_RES (6)..(7): Xaa is C or S
GIPEPXXVPEKMSATSILYYDENK

SEQ ID NO: 12716 - protein, 25 aa, Artificial Sequence
  Cyclic GFR-binding peptide
  MOD_RES (6)..(7): Xaa is C or S
GIPEPXXVPEKMSATSILYYDENKN

SEQ ID NO: 12717 - protein, 14 aa, Artificial Sequence
  Cyclic GFR-binding peptide
  MOD_RES (1)..(1): Xaa is C or S
XVPQDLSPINILYF

SEQ ID NO: 12718 - protein, 21 aa, Artificial Sequence
  Cyclic GFR-binding peptide
  MOD_RES (6)..(7): Xaa is C or S
GSAGPXXTPTKMSATSMLYYN

SEQ ID NO: 12719 - protein, 17 aa, Artificial Sequence
  Cyclic GFR-binding peptide
  MOD_RES (3)..(4): Xaa is C or S
APXXVPQALSPINILYF

SEQ ID NO: 12720 - protein, 17 aa, Artificial Sequence
  Cyclic GFR-binding peptide
  MOD_RES (3)..(4): Xaa is C or S
GPXXTPTKMSATSMLYY

SEQ ID NO: 12721 - protein, 19 aa, Artificial Sequence
  Cyclic GFR-binding peptide
PVKTSATSMLYYDNGRVLL

SEQ ID NO: 12722 - protein, 22 aa, Artificial Sequence
  Cyclic GFR-binding peptide
  MOD_RES (6)..(7): Xaa is C or S
ASASPXXVPQDLSPINILYFVG

SEQ ID NO: 12723 - protein, 17 aa, Artificial Sequence
  Cyclic GFR-binding peptide
  MOD_RES (3)..(4): Xaa is C or S
SPXXVPQDLSPINILYF

SEQ ID NO: 12724 - protein, 15 aa, Artificial Sequence
  Cyclic GFR-binding peptide
  MOD_RES (1)..(2): Xaa is C or S
XXTPTKMEPISMLYL

SEQ ID NO: 12725 - protein, 13 aa, Artificial Sequence
  Cyclic GFR-binding peptide
TPTKMEPISMLYL

SEQ ID NO: 12726 - protein, 24 aa, Artificial Sequence
  Cyclic GFR-binding peptide
  MOD_RES (6)..(7): Xaa is C or S
ASASPXXVSQDLSPINILYFIGKT

SEQ ID NO: 12727 - protein, 24 aa, Artificial Sequence
  Cyclic GFR-binding peptide
  MOD_RES (6)..(7): Xaa is C or S
RVPSTXXAPVKTSATSMLYYDNGR

SEQ ID NO: 12728 - protein, 15 aa, Artificial Sequence
  Cyclic GFR-binding peptide
SPISILYKDSANNVV

SEQ ID NO: 12729 - protein, 15 aa, Artificial Sequence
  Cyclic GFR-binding peptide
  MOD_RES (1)..(2): Xaa is C or S
XXAPVKTSATSMLYY

SEQ ID NO: 12730 - protein, 19 aa, Artificial Sequence
  Cyclic GFR-binding peptide
  MOD_RES (5)..(6): Xaa is C or S
SASPXXVPQDLSPINILYF

SEQ ID NO: 12731 - protein, 20 aa, Artificial Sequence
  Cyclic GFR-binding peptide
  MOD_RES (6)..(7): Xaa is C or S
GIPEPXXVPEKMSATSILYY

SEQ ID NO: 12732 - protein, 22 aa, Artificial Sequence
  Cyclic GFR-binding peptide
  MOD_RES (6)..(7): Xaa is C or S
RVPSTXXAPVKTEPISMLYLDN

SEQ ID NO: 12733 - protein, 18 aa, Artificial Sequence
  Cyclic GFR-binding peptide
  MOD_RES (4)..(5): Xaa is C or S
PSTXXAPVKTEPISMLYL

SEQ ID NO: 12734 - protein, 20 aa, Artificial Sequence
  Cyclic GFR-binding peptide
  MOD_RES (6)..(7): Xaa is C or S
AAPASXXVPARLSATSILYY

SEQ ID NO: 12735 - protein, 15 aa, Artificial Sequence
  Cyclic GFR-binding peptide
EPISILYLDSANNVV

SEQ ID NO: 12736 - protein, 19 aa, Artificial Sequence
  Cyclic GFR-binding peptide
PEKMSPINILYFDENKNVV

SEQ ID NO: 12737 - protein, 15 aa, Artificial Sequence
  Cyclic GFR-binding peptide
SPINILYFVGRTPKV

SEQ ID NO: 12738 - protein, 18 aa, Artificial Sequence
  Cyclic GFR-binding peptide
TRLSPISILYKDSANNVV

SEQ ID NO: 12739 - protein, 22 aa, Artificial Sequence
  Cyclic GFR-binding peptide
  MOD_RES (6)..(7): Xaa is C or S
HVPKPXXAPTKLSPISVLYKDD

SEQ ID NO: 12740 - protein, 16 aa, Artificial Sequence
  Cyclic GFR-binding peptide
  MOD_RES (2)..(3): Xaa is C or S
PXXTPTKMSPISMLYK

SEQ ID NO: 12741 - protein, 14 aa, Artificial Sequence
  Cyclic GFR-binding peptide
  MOD_RES (1)..(1): Xaa is C or S
XVPTRLSATSILYY

SEQ ID NO: 12742 - protein, 13 aa, Artificial Sequence
  Cyclic GFR-binding peptide
APVKTSATSMLYY

SEQ ID NO: 12743 - protein, 22 aa, Artificial Sequence
  Cyclic GFR-binding peptide
  MOD_RES (6)..(7): Xaa is C or S
RVPSTXXAPVKTSPISMLYKDN

SEQ ID NO: 12744 - protein, 14 aa, Artificial Sequence
  Cyclic GFR-binding peptide
  MOD_RES (1)..(1): Xaa is C or S
XTPTKMEPISMLYL

SEQ ID NO: 12745 - protein, 17 aa, Artificial Sequence
  Cyclic GFR-binding peptide
KLSATSILYYDKGVVTY

SEQ ID NO: 12746 - protein, 18 aa, Artificial Sequence
  Cyclic GFR-binding peptide
  MOD_RES (4)..(5): Xaa is C or S
SKAXXVPTKLSATSILYY

SEQ ID NO: 12747 - protein, 15 aa, Artificial Sequence
  Cyclic GFR-binding peptide
SPISMLYKDNGRVLL

SEQ ID NO: 12748 - protein, 22 aa, Artificial Sequence
  Cyclic GFR-binding peptide
  MOD_RES (6)..(7): Xaa is C or S
HVPKPXXAPTKLEPISVLYLDD

SEQ ID NO: 12749 - protein, 15 aa, Artificial Sequence
  Cyclic GFR-binding peptide
  MOD_RES (1)..(2): Xaa is C or S
XXVPTRLSATSILYY

SEQ ID NO: 12750 - protein, 17 aa, Artificial Sequence
  Cyclic GFR-binding peptide
  MOD_RES (3)..(4): Xaa is C or S
EPXXVPEKMNAISILYF

SEQ ID NO: 12751 - protein, 15 aa, Artificial Sequence
  Cyclic GFR-binding peptide
EPISMLYLNDKQQII

SEQ ID NO: 12752 - protein, 14 aa, Artificial Sequence
  Cyclic GFR-binding peptide
  MOD_RES (1)..(1): Xaa is C or S
XAPVKTSATSMLYY

SEQ ID NO: 12753 - protein, 16 aa, Artificial Sequence
  Cyclic GFR-binding peptide
  MOD_RES (2)..(3): Xaa is C or S
TXXAPVKTEPISMLYL

SEQ ID NO: 12754 - protein, 17 aa, Artificial Sequence
  Cyclic GFR-binding peptide
KTEPISMLYLDNGRVLL

SEQ ID NO: 12755 - protein, 15 aa, Artificial Sequence
  Cyclic GFR-binding peptide
  MOD_RES (1)..(2): Xaa is C or S
XXVPQDLSPINILYF

SEQ ID NO: 12756 - protein, 16 aa, Artificial Sequence
  Cyclic GFR-binding peptide
MSATSILYYDENKNVV

SEQ ID NO: 12757 - protein, 19 aa, Artificial Sequence
  Cyclic GFR-binding peptide
  MOD_RES (5)..(6): Xaa is C or S
IPEPXXVPEKMSPISILYK

SEQ ID NO: 12758 - protein, 19 aa, Artificial Sequence
  Cyclic GFR-binding peptide
  MOD_RES (5)..(6): Xaa is C or S
TPPTXXVPTRLSATSILYY

SEQ ID NO: 12759 - protein, 21 aa, Artificial Sequence
  Cyclic GFR-binding peptide
  MOD_RES (6)..(7): Xaa is C or S
HVPKPXXAPTKLSATSVLYYD

SEQ ID NO: 12760 - protein, 20 aa, Artificial Sequence
  Cyclic GFR-binding peptide
  MOD_RES (6)..(7): Xaa is C or S
RVPSTXXAPVKTSATSMLYY

SEQ ID NO: 12761 - protein, 18 aa, Artificial Sequence
  Cyclic GFR-binding peptide
  MOD_RES (4)..(5): Xaa is C or S
PEPXXVPEKMEPISILYL

SEQ ID NO: 12762 - protein, 18 aa, Artificial Sequence
  Cyclic GFR-binding peptide
VKTSPISMLYKDNGRVLL

SEQ ID NO: 12763 - protein, 16 aa, Artificial Sequence
  Cyclic GFR-binding peptide
  MOD_RES (2)..(3): Xaa is C or S
PXXTPTKMSATSMLYY

SEQ ID NO: 12764 - protein, 25 aa, Artificial Sequence
  Cyclic GFR-binding peptide
  MOD_RES (6)..(7): Xaa is C or S
GIPEPXXVPEKMSPINILYFDENKN

SEQ ID NO: 12765 - protein, 16 aa, Artificial Sequence
  Cyclic GFR-binding peptide
  MOD_RES (2)..(3): Xaa is C or S
TXXVPTRLEPISILYL

SEQ ID NO: 12766 - protein, 13 aa, Artificial Sequence
  Cyclic GFR-binding peptide
VPQDLSPINILYF

SEQ ID NO: 12767 - protein, 21 aa, Artificial Sequence
  Cyclic GFR-binding peptide
  MOD_RES (6)..(7): Xaa is C or S
HVPKPXXAPTKLSPISVLYKD

SEQ ID NO: 12768 - protein, 21 aa, Artificial Sequence
  Cyclic GFR-binding peptide
  MOD_RES (6)..(7): Xaa is C or S
ASAAPXXVPQALSPINILYFV

SEQ ID NO: 12769 - protein, 15 aa, Artificial Sequence
  Cyclic GFR-binding peptide
EPISILYLDENKNVV

SEQ ID NO: 12770 - protein, 14 aa, Artificial Sequence
  Cyclic GFR-binding peptide
  MOD_RES (1)..(1): Xaa is C or S
XVPTRLSPISILYK

SEQ ID NO: 12771 - protein, 15 aa, Artificial Sequence
  Cyclic GFR-binding peptide
  MOD_RES (1)..(2): Xaa is C or S
XXVPEKMEPISILYL

SEQ ID NO: 12772 - protein, 16 aa, Artificial Sequence
  Cyclic GFR-binding peptide
  MOD_RES (2)..(3): Xaa is C or S
TXXVPTRLSATSILYY

SEQ ID NO: 12773 - protein, 25 aa, Artificial Sequence
  Cyclic GFR-binding peptide
  MOD_RES (6)..(7): Xaa is C or S
STPPTXXVPTRLEPISILYLDSANN

SEQ ID NO: 12774 - protein, 18 aa, Artificial Sequence
  Cyclic GFR-binding peptide
TKMSPISMLYKNDKQQII

SEQ ID NO: 12775 - protein, 27 aa, Artificial Sequence
  Cyclic GFR-binding peptide
  MOD_RES (6)..(7): Xaa is C or S
KASKAXXVPTKLSATSILYYDKGVVTY

SEQ ID NO: 12776 - protein, 19 aa, Artificial Sequence
  Cyclic GFR-binding peptide
PARLSATSILYYDAANNVV

SEQ ID NO: 12777 - protein, 24 aa, Artificial Sequence
  Cyclic GFR-binding peptide
  MOD_RES (6)..(7): Xaa is C or S
GIPEPXXVPEKMNAISILYFDENK

SEQ ID NO: 12778 - protein, 13 aa, Artificial Sequence
  Cyclic GFR-binding peptide
TPTKMSATSMLYY

SEQ ID NO: 12779 - protein, 20 aa, Artificial Sequence
  Cyclic GFR-binding peptide
  MOD_RES (6)..(7): Xaa is C or S
STPPTXXVPTRLEPISILYL

SEQ ID NO: 12780 - protein, 17 aa, Artificial Sequence
  Cyclic GFR-binding peptide
  MOD_RES (3)..(4): Xaa is C or S
GPXXTPTKMEPISMLYL

SEQ ID NO: 12781 - protein, 18 aa, Artificial Sequence
  Cyclic GFR-binding peptide
  MOD_RES (4)..(5): Xaa is C or S
AGPXXTPTKMSATSMLYY

SEQ ID NO: 12782 - protein, 19 aa, Artificial Sequence
  Cyclic GFR-binding peptide
  MOD_RES (5)..(6): Xaa is C or S
VPSTXXAPVKTSPISMLYK

SEQ ID NO: 12783 - protein, 26 aa, Artificial Sequence
  Cyclic GFR-binding peptide
  MOD_RES (6)..(7): Xaa is C or S
GSAGPXXTPTKMSPISMLYKNDKQQI

SEQ ID NO: 12784 - protein, 23 aa, Artificial Sequence
  Cyclic GFR-binding peptide
  MOD_RES (6)..(7): Xaa is C or S
GIPEPXXVPEKMEPISILYLDEN

SEQ ID NO: 12785 - protein, 16 aa, Artificial Sequence
  Cyclic GFR-binding peptide
  MOD_RES (2)..(3): Xaa is C or S
SXXVPARLSATSILYY

SEQ ID NO: 12786 - protein, 20 aa, Artificial Sequence
  Cyclic GFR-binding peptide
  MOD_RES (6)..(7): Xaa is C or S
HVPKPXXAPTKLEPISVLYL

SEQ ID NO: 12787 - protein, 27 aa, Artificial Sequence
  Cyclic GFR-binding peptide
  MOD_RES (6)..(7): Xaa is C or S
GIPEPXXVPEKMNAISILYFDENKNVV

SEQ ID NO: 12788 - protein, 22 aa, Artificial Sequence
  Cyclic GFR-binding peptide
  MOD_RES (6)..(7): Xaa is C or S
GSAGPXXTPTKMSATSMLYYND

SEQ ID NO: 12789 - protein, 27 aa, Artificial Sequence
  Cyclic GFR-binding peptide
  MOD_RES (6)..(7): Xaa is C or S
AAPASXXVPARLSATSILYYDAANNVV

SEQ ID NO: 12790 - protein, 13 aa, Artificial Sequence
  Cyclic GFR-binding peptide
VPEKMSPINILYF

SEQ ID NO: 12791 - protein, 26 aa, Artificial Sequence
  Cyclic GFR-binding peptide
  MOD_RES (6)..(7): Xaa is C or S
KASKAXXVPTKLSATSILYYDKGVVT

SEQ ID NO: 12792 - protein, 15 aa, Artificial Sequence
  Cyclic GFR-binding peptide
EPISMLYLDNGRVLL

SEQ ID NO: 12793 - protein, 24 aa, Artificial Sequence
  Cyclic GFR-binding peptide
  MOD_RES (6)..(7): Xaa is C or S
ASAAPXXVPQALSPINILYFVGRK

SEQ ID NO: 12794 - protein, 14 aa, Artificial Sequence
  Cyclic GFR-binding peptide
  MOD_RES (1)..(1): Xaa is C or S
XVPEKMEPISILYL

SEQ ID NO: 12795 - protein, 21 aa, Artificial Sequence
  Cyclic GFR-binding peptide
  MOD_RES (6)..(7): Xaa is C or S
GSAGPXXTPTKMSPISMLYKN

SEQ ID NO: 12796 - protein, 17 aa, Artificial Sequence
  Cyclic GFR-binding peptide
DLSPINILYFVGRTPKV

SEQ ID NO: 12797 - protein, 19 aa, Artificial Sequence
  Cyclic GFR-binding peptide
PTKMSATSMLYYNDKQQII

SEQ ID NO: 12798 - protein, 25 aa, Artificial Sequence
  Cyclic GFR-binding peptide
  MOD_RES (6)..(7): Xaa is C or S
ASASPXXVPQDLSPINILYFVGRTP

SEQ ID NO: 12799 - protein, 18 aa, Artificial Sequence
  Cyclic GFR-binding peptide
EKMSATSILYYDENKNVV

SEQ ID NO: 12800 - protein, 27 aa, Artificial Sequence
  Cyclic GFR-binding peptide
  MOD_RES (6)..(7): Xaa is C or S
GIPEPXXVPEKMSPINILYFDENKNVV

SEQ ID NO: 12801 - protein, 25 aa, Artificial Sequence
  Cyclic GFR-binding peptide
  MOD_RES (6)..(7): Xaa is C or S
KASKAXXVPTKLSATSILYYDKGVV

SEQ ID NO: 12802 - protein, 15 aa, Artificial Sequence
  Cyclic GFR-binding peptide
  MOD_RES (1)..(2): Xaa is C or S
XXVPEKMSATSILYY

SEQ ID NO: 12803 - protein, 19 aa, Artificial Sequence
  Cyclic GFR-binding peptide
PQDLSPINILYFVGRTPKV

SEQ ID NO: 12804 - protein, 23 aa, Artificial Sequence
  Cyclic GFR-binding peptide
  MOD_RES (6)..(7): Xaa is C or S
GIPEPXXVPEKMNAISILYFDEN

SEQ ID NO: 12805 - protein, 19 aa, Artificial Sequence
  Cyclic GFR-binding peptide
  MOD_RES (5)..(6): Xaa is C or S
TPPTXXVPTRLEPISILYL

SEQ ID NO: 12806 - protein, 18 aa, Artificial Sequence
  Cyclic GFR-binding peptide
  MOD_RES (4)..(5): Xaa is C or S
AGPXXTPTKMSPISMLYK

SEQ ID NO: 12807 - protein, 14 aa, Artificial Sequence
  Cyclic GFR-binding peptide
  MOD_RES (1)..(1): Xaa is C or S
XAPVKTEPISMLYL

SEQ ID NO: 12808 - protein, 18 aa, Artificial Sequence
  Cyclic GFR-binding peptide
  MOD_RES (4)..(5): Xaa is C or S
PPTXXVPTRLEPISILYL

SEQ ID NO: 12809 - protein, 21 aa, Artificial Sequence
  Cyclic GFR-binding peptide
  MOD_RES (6)..(7): Xaa is C or S
GIPEPXXVPEKMSPINILYFD

SEQ ID NO: 12810 - protein, 15 aa, Artificial Sequence
  Cyclic GFR-binding peptide
  MOD_RES (1)..(2): Xaa is C or S
XXAPVKTEPISMLYL

SEQ ID NO: 12811 - protein, 16 aa, Artificial Sequence
  Cyclic GFR-binding peptide
  MOD_RES (2)..(3): Xaa is C or S
PXXVPEKMSATSILYY

SEQ ID NO: 12812 - protein, 19 aa, Artificial Sequence
  Cyclic GFR-binding peptide
PTRLSATSILYYDSANNVV

SEQ ID NO: 12813 - protein, 27 aa, Artificial Sequence
  Cyclic GFR-binding peptide
  MOD_RES (6)..(7): Xaa is C or S
STPPTXXVPTRLSATSILYYDSANNVV

SEQ ID NO: 12814 - protein, 15 aa, Artificial Sequence
  Cyclic GFR-binding peptide
SATSILYYDKGVVTY

SEQ ID NO: 12815 - protein, 26 aa, Artificial Sequence
  Cyclic GFR-binding peptide
  MOD_RES (6)..(7): Xaa is C or S
STPPTXXVPTRLSPISILYKDSANNV

SEQ ID NO: 12816 - protein, 17 aa, Artificial Sequence
  Cyclic GFR-binding peptide
KMEPISILYLDENKNVV

SEQ ID NO: 12817 - protein, 21 aa, Artificial Sequence
  Cyclic GFR-binding peptide
  MOD_RES (6)..(7): Xaa is C or S
GIPEPXXVPEKMSATSILYYD

SEQ ID NO: 12818 - protein, 13 aa, Artificial Sequence
  Cyclic GFR-binding peptide
VPTRLEPISILYL

SEQ ID NO: 12819 - protein, 23 aa, Artificial Sequence
  Cyclic GFR-binding peptide
  MOD_RES (6)..(7): Xaa is C or S
GIPEPXXVPEKMSPINILYFDEN

SEQ ID NO: 12820 - protein, 16 aa, Artificial Sequence
  Cyclic GFR-binding peptide
LSATSILYYDAANNVV

SEQ ID NO: 12821 - protein, 26 aa, Artificial Sequence
  Cyclic GFR-binding peptide
  MOD_RES (6)..(7): Xaa is C or S
RVPSTXXAPVKTSPISMLYKDNGRVL

SEQ ID NO: 12822 - protein, 18 aa, Artificial Sequence
  Cyclic GFR-binding peptide
  MOD_RES (4)..(5): Xaa is C or S
PEPXXVPEKMSATSILYY

SEQ ID NO: 12823 - protein, 17 aa, Artificial Sequence
  Cyclic GFR-binding peptide
  MOD_RES (3)..(4): Xaa is C or S
STXXAPVKTEPISMLYL

SEQ ID NO: 12824 - protein, 21 aa, Artificial Sequence
  Cyclic GFR-binding peptide
  MOD_RES (6)..(7): Xaa is C or S
STPPTXXVPTRLSPISILYKD

SEQ ID NO: 12825 - protein, 15 aa, Artificial Sequence
  Cyclic GFR-binding peptide
  MOD_RES (1)..(2): Xaa is C or S
XXAPVKTSPISMLYK

SEQ ID NO: 12826 - protein, 22 aa, Artificial Sequence
  Cyclic GFR-binding peptide
  MOD_RES (6)..(7): Xaa is C or S
HVPKPXXAPTKLSATSVLYYDD

SEQ ID NO: 12827 - protein, 14 aa, Artificial Sequence
  Cyclic GFR-binding peptide
  MOD_RES (1)..(1): Xaa is C or S
XVPTRLEPISILYL

SEQ ID NO: 12828 - protein, 15 aa, Artificial Sequence
  Cyclic GFR-binding peptide
  MOD_RES (1)..(2): Xaa is C or S
XXVPEKMNAISILYF

SEQ ID NO: 12829 - protein, 14 aa, Artificial Sequence
  Cyclic GFR-binding peptide
  MOD_RES (1)..(1): Xaa is C or S
XAPVKTSPISMLYK

SEQ ID NO: 12830 - protein, 20 aa, Artificial Sequence
  Cyclic GFR-binding peptide
  MOD_RES (6)..(7): Xaa is C or S
ASASPXXVSQDLSPINILYF

SEQ ID NO: 12831 - protein, 26 aa, Artificial Sequence
  Cyclic GFR-binding peptide
  MOD_RES (6)..(7): Xaa is C or S
GIPEPXXVPEKMNAISILYFDENKNV

SEQ ID NO: 12832 - protein, 16 aa, Artificial Sequence
  Cyclic GFR-binding peptide
  MOD_RES (2)..(3): Xaa is C or S
PXXVPQDLSPINILYF

SEQ ID NO: 12833 - protein, 19 aa, Artificial Sequence
  Cyclic GFR-binding peptide
  MOD_RES (5)..(6): Xaa is C or S
APASXXVPARLSATSILYY

SEQ ID NO: 12834 - protein, 18 aa, Artificial Sequence
  Cyclic GFR-binding peptide
  MOD_RES (4)..(5): Xaa is C or S
AGPXXTPTKMEPISMLYL

SEQ ID NO: 12835 - protein, 13 aa, Artificial Sequence
  Cyclic GFR-binding peptide
VPEKMSPISILYK

SEQ ID NO: 12836 - protein, 16 aa, Artificial Sequence
  Cyclic GFR-binding peptide
MSATSMLYYNDKQQII

SEQ ID NO: 12837 - protein, 15 aa, Artificial Sequence
  Cyclic GFR-binding peptide
  MOD_RES (1)..(2): Xaa is C or S
XXVPEKMSPISILYK

SEQ ID NO: 12838 - protein, 15 aa, Artificial Sequence
  Cyclic GFR-binding peptide
NAISILYFDENKNVV

SEQ ID NO: 12839 - protein, 19 aa, Artificial Sequence
  Cyclic GFR-binding peptide
PEKMEPISILYLDENKNVV

SEQ ID NO: 12840 - protein, 23 aa, Artificial Sequence
  Cyclic GFR-binding peptide
  MOD_RES (6)..(7): Xaa is C or S
GSAGPXXTPTKMEPISMLYLNDK

SEQ ID NO: 12841 - protein, 20 aa, Artificial Sequence
  Cyclic GFR-binding peptide
  MOD_RES (6)..(7): Xaa is C or S
GIPEPXXVPEKMSPINILYF

SEQ ID NO: 12842 - protein, 19 aa, Artificial Sequence
  Cyclic GFR-binding peptide
  MOD_RES (5)..(6): Xaa is C or S
VPSTXXAPVKTEPISMLYL

SEQ ID NO: 12843 - protein, 20 aa, Artificial Sequence
  Cyclic GFR-binding peptide
  MOD_RES (6)..(7): Xaa is C or S
RVPSTXXAPVKTSPISMLYK

SEQ ID NO: 12844 - protein, 24 aa, Artificial Sequence
  Cyclic GFR-binding peptide
  MOD_RES (6)..(7): Xaa is C or S
GIPEPXXVPEKMEPISILYLDENK

SEQ ID NO: 12845 - protein, 26 aa, Artificial Sequence
  Cyclic GFR-binding peptide
  MOD_RES (6)..(7): Xaa is C or S
GIPEPXXVPEKMSPISILYKDENKNV

SEQ ID NO: 12846 - protein, 14 aa, Artificial Sequence
  Cyclic GFR-binding peptide
  MOD_RES (1)..(1): Xaa is C or S
XVPEKMSPISILYK

SEQ ID NO: 12847 - protein, 25 aa, Artificial Sequence
  Cyclic GFR-binding peptide
  MOD_RES (6)..(7): Xaa is C or S
HVPKPXXAPTKLEPISVLYLDDSSN

SEQ ID NO: 12848 - protein, 18 aa, Artificial Sequence
  Cyclic GFR-binding peptide
EKMEPISILYLDENKNVV

SEQ ID NO: 12849 - protein, 18 aa, Artificial Sequence
  Cyclic GFR-binding peptide
  MOD_RES (4)..(5): Xaa is C or S
PEPXXVPEKMNAISILYF

SEQ ID NO: 12850 - protein, 15 aa, Artificial Sequence
  Cyclic GFR-binding peptide
  MOD_RES (1)..(2): Xaa is C or S
XXVPTRLSPISILYK

SEQ ID NO: 12851 - protein, 22 aa, Artificial Sequence
  Cyclic GFR-binding peptide
  MOD_RES (6)..(7): Xaa is C or S
RVPSTXXAPVKTSATSMLYYDN

SEQ ID NO: 12852 - protein, 21 aa, Artificial Sequence
  Cyclic GFR-binding peptide
  MOD_RES (6)..(7): Xaa is C or S
KASKAXXVPTKLSATSILYYD

SEQ ID NO: 12853 - protein, 25 aa, Artificial Sequence
  Cyclic GFR-binding peptide
  MOD_RES (6)..(7): Xaa is C or S
GSAGPXXTPTKMEPISMLYLNDKQQ

SEQ ID NO: 12854 - protein, 20 aa, Artificial Sequence
  Cyclic GFR-binding peptide
  MOD_RES (6)..(7): Xaa is C or S
GSAGPXXTPTKMSATSMLYY

SEQ ID NO: 12855 - protein, 26 aa, Artificial Sequence
  Cyclic GFR-binding peptide
  MOD_RES (6)..(7): Xaa is C or S
GIPEPXXVPEKMEPISILYLDENKNV

SEQ ID NO: 12856 - protein, 16 aa, Artificial Sequence
  Cyclic GFR-binding peptide
  MOD_RES (2)..(3): Xaa is C or S
PXXVPEKMSPINILYF

SEQ ID NO: 12857 - protein, 27 aa, Artificial Sequence
  Cyclic GFR-binding peptide
  MOD_RES (6)..(7): Xaa is C or S
ASASPXXVSQDLSPINILYFIGKTPKI

SEQ ID NO: 12858 - protein, 15 aa, Artificial Sequence
  Cyclic GFR-binding peptide
SPINILYFDENKNVV

SEQ ID NO: 12859 - protein, 23 aa, Artificial Sequence
  Cyclic GFR-binding peptide
  MOD_RES (6)..(7): Xaa is C or S
RVPSTXXAPVKTEPISMLYLDNG

SEQ ID NO: 12860 - protein, 26 aa, Artificial Sequence
  Cyclic GFR-binding peptide
  MOD_RES (6)..(7): Xaa is C or S
HVPKPXXAPTKLSATSVLYYDDSSNV

SEQ ID NO: 12861 - protein, 25 aa, Artificial Sequence
  Cyclic GFR-binding peptide
  MOD_RES (6)..(7): Xaa is C or S
AAPASXXVPARLSATSILYYDAANN

SEQ ID NO: 12862 - protein, 25 aa, Artificial Sequence
  Cyclic GFR-binding peptide
  MOD_RES (6)..(7): Xaa is C or S
GSAGPXXTPTKMSPISMLYKNDKQQ

SEQ ID NO: 12863 - protein, 13 aa, Artificial Sequence
  Cyclic GFR-binding peptide
APVKTSPISMLYK

SEQ ID NO: 12864 - protein, 20 aa, Artificial Sequence
  Cyclic GFR-binding peptide
  MOD_RES (6)..(7): Xaa is C or S
ASAAPXXVPQALSPINILYF

SEQ ID NO: 12865 - protein, 22 aa, Artificial Sequence
  Cyclic GFR-binding peptide
  MOD_RES (6)..(7): Xaa is C or S
AAPASXXVPARLSATSILYYDA

SEQ ID NO: 12866 - protein, 19 aa, Artificial Sequence
  Cyclic GFR-binding peptide
  MOD_RES (5)..(6): Xaa is C or S
SAGPXXTPTKMSPISMLYK

SEQ ID NO: 12867 - protein, 16 aa, Artificial Sequence
  Cyclic GFR-binding peptide
  MOD_RES (2)..(3): Xaa is C or S
PXXVPEKMEPISILYL

SEQ ID NO: 12868 - protein, 26 aa, Artificial Sequence
  Cyclic GFR-binding peptide
  MOD_RES (6)..(7): Xaa is C or S
GSAGPXXTPTKMSATSMLYYNDKQQI

SEQ ID NO: 12869 - protein, 19 aa, Artificial Sequence
  Cyclic GFR-binding peptide
  MOD_RES (5)..(6): Xaa is C or S
IPEPXXVPEKMSPINILYF

SEQ ID NO: 12870 - protein, 24 aa, Artificial Sequence
  Cyclic GFR-binding peptide
  MOD_RES (6)..(7): Xaa is C or S
STPPTXXVPTRLSATSILYYDSAN

SEQ ID NO: 12871 - protein, 20 aa, Artificial Sequence
  Cyclic GFR-binding peptide
  MOD_RES (6)..(7): Xaa is C or S
GSAGPXXTPTKMEPISMLYL

SEQ ID NO: 12872 - protein, 25 aa, Artificial Sequence
  Cyclic GFR-binding peptide
  MOD_RES (6)..(7): Xaa is C or S
RVPSTXXAPVKTSATSMLYYDNGRV

SEQ ID NO: 12873 - protein, 18 aa, Artificial Sequence
  Cyclic GFR-binding peptide
VKTEPISMLYLDNGRVLL

SEQ ID NO: 12874 - protein, 18 aa, Artificial Sequence
  Cyclic GFR-binding peptide
  MOD_RES (4)..(5): Xaa is C or S
ASPXXVPQDLSPINILYF

SEQ ID NO: 12875 - protein, 26 aa, Artificial Sequence
  Cyclic GFR-binding peptide
  MOD_RES (6)..(7): Xaa is C or S
ASASPXXVSQDLSPINILYFIGKTPK

SEQ ID NO: 12876 - protein, 18 aa, Artificial Sequence
  Cyclic GFR-binding peptide
  MOD_RES (4)..(5): Xaa is C or S
PSTXXAPVKTSATSMLYY

SEQ ID NO: 12877 - protein, 13 aa, Artificial Sequence
  Cyclic GFR-binding peptide
VPEKMEPISILYL

SEQ ID NO: 12878 - protein, 18 aa, Artificial Sequence
  Cyclic GFR-binding peptide
ARLSATSILYYDAANNVV

SEQ ID NO: 12879 - protein, 25 aa, Artificial Sequence
  Cyclic GFR-binding peptide
  MOD_RES (6)..(7): Xaa is C or S
RVPSTXXAPVKTSPISMLYKDNGRV

SEQ ID NO: 12880 - protein, 20 aa, Artificial Sequence
  Cyclic GFR-binding peptide
  MOD_RES (6)..(7): Xaa is C or S
HVPKPXXAPTKLSATSVLYY

SEQ ID NO: 12881 - protein, 16 aa, Artificial Sequence
  Cyclic GFR-binding peptide
LSATSILYYDKGVVTY

SEQ ID NO: 12882 - protein, 24 aa, Artificial Sequence
  Cyclic GFR-binding peptide
  MOD_RES (6)..(7): Xaa is C or S
RVPSTXXAPVKTSPISMLYKDNGR

SEQ ID NO: 12883 - protein, 16 aa, Artificial Sequence
  Cyclic GFR-binding peptide
  MOD_RES (2)..(3): Xaa is C or S
AXXVPTKLSATSILYY

SEQ ID NO: 12884 - protein, 19 aa, Artificial Sequence
  Cyclic GFR-binding peptide
  MOD_RES (5)..(6): Xaa is C or S
SAGPXXTPTKMSATSMLYY

SEQ ID NO: 12885 - protein, 26 aa, Artificial Sequence
  Cyclic GFR-binding peptide
  MOD_RES (6)..(7): Xaa is C or S
ASASPXXVPQDLSPINILYFVGRTPK

SEQ ID NO: 12886 - protein, 17 aa, Artificial Sequence
  Cyclic GFR-binding peptide
RLSATSILYYDAANNVV

SEQ ID NO: 12887 - protein, 19 aa, Artificial Sequence
  Cyclic GFR-binding peptide
PTKMSPISMLYKNDKQQII

SEQ ID NO: 12888 - protein, 15 aa, Artificial Sequence
  Cyclic GFR-binding peptide
  MOD_RES (1)..(2): Xaa is C or S
XXVSQDLSPINILYF

SEQ ID NO: 12889 - protein, 24 aa, Artificial Sequence
  Cyclic GFR-binding peptide
  MOD_RES (6)..(7): Xaa is C or S
RVPSTXXAPVKTEPISMLYLDNGR

SEQ ID NO: 12890 - protein, 19 aa, Artificial Sequence
  Cyclic GFR-binding peptide
PTRLSPISILYKDSANNVV

SEQ ID NO: 12891 - protein, 16 aa, Artificial Sequence
  Cyclic GFR-binding peptide
  MOD_RES (2)..(3): Xaa is C or S
PXXVPQALSPINILYF

SEQ ID NO: 12892 - protein, 25 aa, Artificial Sequence
  Cyclic GFR-binding peptide
  MOD_RES (6)..(7): Xaa is C or S
GSAGPXXTPTKMSATSMLYYNDKQQ

SEQ ID NO: 12893 - protein, 18 aa, Artificial Sequence
  Cyclic GFR-binding peptide
TKLSATSILYYDKGVVTY

SEQ ID NO: 12894 - protein, 18 aa, Artificial Sequence
  Cyclic GFR-binding peptide
  MOD_RES (4)..(5): Xaa is C or S
PSTXXAPVKTSPISMLYK

SEQ ID NO: 12895 - protein, 19 aa, Artificial Sequence
  Cyclic GFR-binding peptide
PEKMNAISILYFDENKNVV

SEQ ID NO: 12896 - protein, 20 aa, Artificial Sequence
  Cyclic GFR-binding peptide
  MOD_RES (6)..(7): Xaa is C or S
RVPSTXXAPVKTEPISMLYL

SEQ ID NO: 12897 - protein, 22 aa, Artificial Sequence
  Cyclic GFR-binding peptide
  MOD_RES (6)..(7): Xaa is C or S
STPPTXXVPTRLSATSILYYDS

SEQ ID NO: 12898 - protein, 16 aa, Artificial Sequence
  Cyclic GFR-binding peptide
LSPINILYFIGKTPKI

SEQ ID NO: 12899 - protein, 16 aa, Artificial Sequence
  Cyclic GFR-binding peptide
  MOD_RES (2)..(3): Xaa is C or S
TXXAPVKTSATSMLYY

SEQ ID NO: 12900 - protein, 25 aa, Artificial Sequence
  Cyclic GFR-binding peptide
  MOD_RES (6)..(7): Xaa is C or S
STPPTXXVPTRLSPISILYKDSANN

SEQ ID NO: 12901 - protein, 15 aa, Artificial Sequence
  Cyclic GFR-binding peptide
SATSILYYDSANNVV

SEQ ID NO: 12902 - protein, 16 aa, Artificial Sequence
  Cyclic GFR-binding peptide
MSPISMLYKNDKQQII

SEQ ID NO: 12903 - protein, 21 aa, Artificial Sequence
  Cyclic GFR-binding peptide
  MOD_RES (6)..(7): Xaa is C or S
AAPASXXVPARLSATSILYYD

SEQ ID NO: 12904 - protein, 17 aa, Artificial Sequence
  Cyclic GFR-binding peptide
  MOD_RES (3)..(4): Xaa is C or S
STXXAPVKTSATSMLYY

SEQ ID NO: 12905 - protein, 17 aa, Artificial Sequence
  Cyclic GFR-binding peptide
KMSPINILYFDENKNVV

SEQ ID NO: 12906 - protein, 13 aa, Artificial Sequence
  Cyclic GFR-binding peptide
VPEKMSATSILYY

SEQ ID NO: 12907 - protein, 19 aa, Artificial Sequence
  Cyclic GFR-binding peptide
  MOD_RES (5)..(6): Xaa is C or S
SAGPXXTPTKMEPISMLYL

SEQ ID NO: 12908 - protein, 21 aa, Artificial Sequence
  Cyclic GFR-binding peptide
  MOD_RES (6)..(7): Xaa is C or S
GIPEPXXVPEKMSPISILYKD

SEQ ID NO: 12909 - protein, 27 aa, Artificial Sequence
  Cyclic GFR-binding peptide
  MOD_RES (6)..(7): Xaa is C or S
GIPEPXXVPEKMEPISILYLDENKNVV

SEQ ID NO: 12910 - protein, 13 aa, Artificial Sequence
  Cyclic GFR-binding peptide
APVKTEPISMLYL

SEQ ID NO: 12911 - protein, 27 aa, Artificial Sequence
  Cyclic GFR-binding peptide
  MOD_RES (6)..(7): Xaa is C or S
GSAGPXXTPTKMEPISMLYLNDKQQII

SEQ ID NO: 12912 - protein, 16 aa, Artificial Sequence
  Cyclic GFR-binding peptide
  MOD_RES (2)..(3): Xaa is C or S
TXXAPVKTSPISMLYK

SEQ ID NO: 12913 - protein, 25 aa, Artificial Sequence
  Cyclic GFR-binding peptide
  MOD_RES (6)..(7): Xaa is C or S
STPPTXXVPTRLSATSILYYDSANN

SEQ ID NO: 12914 - protein, 16 aa, Artificial Sequence
  Cyclic GFR-binding peptide
LSPINILYFVGRKPKV

SEQ ID NO: 12915 - protein, 13 aa, Artificial Sequence
  Cyclic GFR-binding peptide
VPTKLSATSILYY

SEQ ID NO: 12916 - protein, 17 aa, Artificial Sequence
  Cyclic GFR-binding peptide
  MOD_RES (3)..(4): Xaa is C or S
STXXAPVKTSPISMLYK

SEQ ID NO: 12917 - protein, 15 aa, Artificial Sequence
  Cyclic GFR-binding peptide
  MOD_RES (1)..(2): Xaa is C or S
XXVPTRLEPISILYL

SEQ ID NO: 12918 - protein, 17 aa, Artificial Sequence
  Cyclic GFR-binding peptide
KMNAISILYFDENKNVV

SEQ ID NO: 12919 - protein, 18 aa, Artificial Sequence
  Cyclic GFR-binding peptide
EKMSPINILYFDENKNVV

SEQ ID NO: 12920 - protein, 19 aa, Artificial Sequence
  Cyclic GFR-binding peptide
PTKLSATSILYYDKGVVTY

SEQ ID NO: 12921 - protein, 20 aa, Artificial Sequence
  Cyclic GFR-binding peptide
  MOD_RES (6)..(7): Xaa is C or S
GSAGPXXTPTKMSPISMLYK

SEQ ID NO: 12922 - protein, 23 aa, Artificial Sequence
  Cyclic GFR-binding peptide
  MOD_RES (6)..(7): Xaa is C or S
STPPTXXVPTRLSATSILYYDSA

SEQ ID NO: 12923 - protein, 26 aa, Artificial Sequence
  Cyclic GFR-binding peptide
  MOD_RES (6)..(7): Xaa is C or S
STPPTXXVPTRLSATSILYYDSANNV

SEQ ID NO: 12924 - protein, 27 aa, Artificial Sequence
  Cyclic GFR-binding peptide
  MOD_RES (6)..(7): Xaa is C or S
ASASPXXVPQDLSPINILYFVGRTPKV

SEQ ID NO: 12925 - protein, 26 aa, Artificial Sequence
  Cyclic GFR-binding peptide
  MOD_RES (6)..(7): Xaa is C or S
GSAGPXXTPTKMEPISMLYLNDKQQI

SEQ ID NO: 12926 - protein, 18 aa, Artificial Sequence
  Cyclic GFR-binding peptide
TRLSATSILYYDSANNVV

SEQ ID NO: 12927 - protein, 16 aa, Artificial Sequence
  Cyclic GFR-binding peptide
MSPINILYFDENKNVV

SEQ ID NO: 12928 - protein, 22 aa, Artificial Sequence
  Cyclic GFR-binding peptide
  MOD_RES (6)..(7): Xaa is C or S
STPPTXXVPTRLSPISILYKDS

SEQ ID NO: 12929 - protein, 15 aa, Artificial Sequence
  Cyclic GFR-binding peptide
  MOD_RES (1)..(2): Xaa is C or S
XXVPARLSATSILYY

SEQ ID NO: 12930 - protein, 18 aa, Artificial Sequence
  Cyclic GFR-binding peptide
VKTSATSMLYYDNGRVLL

SEQ ID NO: 12931 - protein, 22 aa, Artificial Sequence
  Cyclic GFR-binding peptide
  MOD_RES (6)..(7): Xaa is C or S
STPPTXXVPTRLEPISILYLDS

SEQ ID NO: 12932 - protein, 22 aa, Artificial Sequence
  Cyclic GFR-binding peptide
  MOD_RES (6)..(7): Xaa is C or S
GSAGPXXTPTKMSPISMLYKND

SEQ ID NO: 12933 - protein, 14 aa, Artificial Sequence
  Cyclic GFR-binding peptide
  MOD_RES (1)..(1): Xaa is C or S
XVPARLSATSILYY

SEQ ID NO: 12934 - protein, 16 aa, Artificial Sequence
  Cyclic GFR-binding peptide
LSPINILYFVGRTPKV

SEQ ID NO: 12935 - protein, 23 aa, Artificial Sequence
  Cyclic GFR-binding peptide
  MOD_RES (6)..(7): Xaa is C or S
ASASPXXVSQDLSPINILYFIGK

SEQ ID NO: 12936 - protein, 20 aa, Artificial Sequence
  Cyclic GFR-binding peptide
  MOD_RES (6)..(7): Xaa is C or S
HVPKPXXAPTKLSPISVLYK

SEQ ID NO: 12937 - protein, 25 aa, Artificial Sequence
  Cyclic GFR-binding peptide
  MOD_RES (6)..(7): Xaa is C or S
HVPKPXXAPTKLSATSVLYYDDSSN

SEQ ID NO: 12938 - protein, 23 aa, Artificial Sequence
  Cyclic GFR-binding peptide
  MOD_RES (6)..(7): Xaa is C or S
AAPASXXVPARLSATSILYYDAA

SEQ ID NO: 12939 - protein, 22 aa, Artificial Sequence
  Cyclic GFR-binding peptide
  MOD_RES (6)..(7): Xaa is C or S
GSAGPXXTPTKMEPISMLYLND

SEQ ID NO: 12940 - protein, 15 aa, Artificial Sequence
  Cyclic GFR-binding peptide
SATSMLYYDNGRVLL

SEQ ID NO: 12941 - protein, 18 aa, Artificial Sequence
  Cyclic GFR-binding peptide
TKMSATSMLYYNDKQQII

SEQ ID NO: 12942 - protein, 14 aa, Artificial Sequence
  Cyclic GFR-binding peptide
  MOD_RES (1)..(1): Xaa is C or S
XVPQALSPINILYF

SEQ ID NO: 12943 - protein, 17 aa, Artificial Sequence
  Cyclic GFR-binding peptide
  MOD_RES (3)..(4): Xaa is C or S
PTXXVPTRLSATSILYY

SEQ ID NO: 12944 - protein, 27 aa, Artificial Sequence
  Cyclic GFR-binding peptide
  MOD_RES (6)..(7): Xaa is C or S
RVPSTXXAPVKTEPISMLYLDNGRVLL

SEQ ID NO: 12945 - protein, 22 aa, Artificial Sequence
  Cyclic GFR-binding peptide
  MOD_RES (6)..(7): Xaa is C or S
GIPEPXXVPEKMSPINILYFDE

SEQ ID NO: 12946 - protein, 18 aa, Artificial Sequence
  Cyclic GFR-binding peptide
  MOD_RES (4)..(5): Xaa is C or S
ASPXXVSQDLSPINILYF

SEQ ID NO: 12947 - protein, 18 aa, Artificial Sequence
  Cyclic GFR-binding peptide
  MOD_RES (4)..(5): Xaa is C or S
PPTXXVPTRLSPISILYK

SEQ ID NO: 12948 - protein, 16 aa, Artificial Sequence
  Cyclic GFR-binding peptide
TSPISMLYKDNGRVLL

SEQ ID NO: 12949 - protein, 25 aa, Artificial Sequence
  Cyclic GFR-binding peptide
  MOD_RES (6)..(7): Xaa is C or S
ASAAPXXVPQALSPINILYFVGRKP

SEQ ID NO: 12950 - protein, 27 aa, Artificial Sequence
  Cyclic GFR-binding peptide
  MOD_RES (6)..(7): Xaa is C or S
GSAGPXXTPTKMSATSMLYYNDKQQII

SEQ ID NO: 12951 - protein, 16 aa, Artificial Sequence
  Cyclic GFR-binding peptide
  MOD_RES (2)..(3): Xaa is C or S
PXXVPEKMNAISILYF

SEQ ID NO: 12952 - protein, 27 aa, Artificial Sequence
  Cyclic GFR-binding peptide
  MOD_RES (6)..(7): Xaa is C or S
HVPKPXXAPTKLEPISVLYLDDSSNVI

SEQ ID NO: 12953 - protein, 20 aa, Artificial Sequence
  Cyclic GFR-binding peptide
  MOD_RES (6)..(7): Xaa is C or S
STPPTXXVPTRLSPISILYK

SEQ ID NO: 12954 - protein, 22 aa, Artificial Sequence
  Cyclic GFR-binding peptide
  MOD_RES (6)..(7): Xaa is C or S
GIPEPXXVPEKMSPISILYKDE

SEQ ID NO: 12955 - protein, 15 aa, Artificial Sequence
  Cyclic GFR-binding peptide
SPINILYFVGRKPKV

SEQ ID NO: 12956 - protein, 14 aa, Artificial Sequence
  Cyclic GFR-binding peptide
  MOD_RES (1)..(1): Xaa is C or S
XVSQDLSPINILYF

SEQ ID NO: 12957 - protein, 27 aa, Artificial Sequence
  Cyclic GFR-binding peptide
  MOD_RES (6)..(7): Xaa is C or S
GIPEPXXVPEKMSATSILYYDENKNVV

SEQ ID NO: 12958 - protein, 23 aa, Artificial Sequence
  Cyclic GFR-binding peptide
  MOD_RES (6)..(7): Xaa is C or S
STPPTXXVPTRLEPISILYLDSA

SEQ ID NO: 12959 - protein, 21 aa, Artificial Sequence
  Cyclic GFR-binding peptide
  MOD_RES (6)..(7): Xaa is C or S
RVPSTXXAPVKTEPISMLYLD

SEQ ID NO: 12960 - protein, 17 aa, Artificial Sequence
  Cyclic GFR-binding peptide
KMSATSILYYDENKNVV

SEQ ID NO: 12961 - protein, 16 aa, Artificial Sequence
  Cyclic GFR-binding peptide
TEPISMLYLDNGRVLL

SEQ ID NO: 12962 - protein, 22 aa, Artificial Sequence
  Cyclic GFR-binding peptide
  MOD_RES (6)..(7): Xaa is C or S
GIPEPXXVPEKMEPISILYLDE

SEQ ID NO: 12963 - protein, 17 aa, Artificial Sequence
  Cyclic GFR-binding peptide
  MOD_RES (3)..(4): Xaa is C or S
ASXXVPARLSATSILYY

SEQ ID NO: 12964 - protein, 22 aa, Artificial Sequence
  Cyclic GFR-binding peptide
  MOD_RES (6)..(7): Xaa is C or S
ASAAPXXVPQALSPINILYFVG

SEQ ID NO: 12965 - protein, 21 aa, Artificial Sequence
  Cyclic GFR-binding peptide
  MOD_RES (6)..(7): Xaa is C or S
STPPTXXVPTRLSATSILYYD

SEQ ID NO: 12966 - protein, 27 aa, Artificial Sequence
  Cyclic GFR-binding peptide
  MOD_RES (6)..(7): Xaa is C or S
STPPTXXVPTRLEPISILYLDSANNVV

SEQ ID NO: 12967 - protein, 19 aa, Artificial Sequence
  Cyclic GFR-binding peptide
  MOD_RES (5)..(6): Xaa is C or S
SASPXXVSQDLSPINILYF

SEQ ID NO: 12968 - protein, 21 aa, Artificial Sequence
  Cyclic GFR-binding peptide
  MOD_RES (6)..(7): Xaa is C or S
STPPTXXVPTRLEPISILYLD

SEQ ID NO: 12969 - protein, 26 aa, Artificial Sequence
  Cyclic GFR-binding peptide
  MOD_RES (6)..(7): Xaa is C or S
STPPTXXVPTRLEPISILYLDSANNV

SEQ ID NO: 12970 - protein, 18 aa, Artificial Sequence
  Cyclic GFR-binding peptide
EKMNAISILYFDENKNVV

SEQ ID NO: 12971 - protein, 20 aa, Artificial Sequence
  Cyclic GFR-binding peptide
  MOD_RES (6)..(7): Xaa is C or S
GIPEPXXVPEKMNAISILYF

SEQ ID NO: 12972 - protein, 17 aa, Artificial Sequence
  Cyclic GFR-binding peptide
  MOD_RES (3)..(4): Xaa is C or S
EPXXVPEKMSPISILYK

SEQ ID NO: 12973 - protein, 19 aa, Artificial Sequence
  Cyclic GFR-binding peptide
PEKMSATSILYYDENKNVV

SEQ ID NO: 12974 - protein, 13 aa, Artificial Sequence
  Cyclic GFR-binding peptide
VPQALSPINILYF

SEQ ID NO: 12975 - protein, 16 aa, Artificial Sequence
  Cyclic GFR-binding peptide
LEPISILYLDSANNVV

SEQ ID NO: 12976 - protein, 15 aa, Artificial Sequence
  Cyclic GFR-binding peptide
SPINILYFIGKTPKI

SEQ ID NO: 12977 - protein, 16 aa, Artificial Sequence
  Cyclic GFR-binding peptide
MSPISILYKDENKNVV

SEQ ID NO: 12978 - protein, 21 aa, Artificial Sequence
  Cyclic GFR-binding peptide
  MOD_RES (6)..(7): Xaa is C or S
RVPSTXXAPVKTSATSMLYYD

SEQ ID NO: 12979 - protein, 18 aa, Artificial Sequence
  Cyclic GFR-binding peptide
QDLSPINILYFIGKTPKI

SEQ ID NO: 12980 - protein, 26 aa, Artificial Sequence
  Cyclic GFR-binding peptide
  MOD_RES (6)..(7): Xaa is C or S
HVPKPXXAPTKLEPISVLYLDDSSNV

SEQ ID NO: 12981 - protein, 26 aa, Artificial Sequence
  Cyclic GFR-binding peptide
  MOD_RES (6)..(7): Xaa is C or S
AAPASXXVPARLSATSILYYDAANNV

SEQ ID NO: 12982 - protein, 17 aa, Artificial Sequence
  Cyclic GFR-binding peptide
  MOD_RES (3)..(4): Xaa is C or S
PTXXVPTRLEPISILYL

SEQ ID NO: 12983 - protein, 13 aa, Artificial Sequence
  Cyclic GFR-binding peptide
TPTKMSPISMLYK

SEQ ID NO: 12984 - protein, 25 aa, Artificial Sequence
  Cyclic GFR-binding peptide
  MOD_RES (6)..(7): Xaa is C or S
ASASPXXVSQDLSPINILYFIGKTP

SEQ ID NO: 12985 - protein, 26 aa, Artificial Sequence
  Cyclic GFR-binding peptide
  MOD_RES (6)..(7): Xaa is C or S
GIPEPXXVPEKMSPINILYFDENKNV

SEQ ID NO: 12986 - protein, 13 aa, Artificial Sequence
  Cyclic GFR-binding peptide
VSQDLSPINILYF

SEQ ID NO: 12987 - protein, 19 aa, Artificial Sequence
  Cyclic GFR-binding peptide
PVKTEPISMLYLDNGRVLL

SEQ ID NO: 12988 - protein, 22 aa, Artificial Sequence
  Cyclic GFR-binding peptide
  MOD_RES (6)..(7): Xaa is C or S
KASKAXXVPTKLSATSILYYDK

SEQ ID NO: 12989 - protein, 22 aa, Artificial Sequence
  Cyclic GFR-binding peptide
  MOD_RES (6)..(7): Xaa is C or S
GIPEPXXVPEKMNAISILYFDE

SEQ ID NO: 12990 - protein, 27 aa, Artificial Sequence
  Cyclic GFR-binding peptide
  MOD_RES (6)..(7): Xaa is C or S
RVPSTXXAPVKTSPISMLYKDNGRVLL

SEQ ID NO: 12991 - protein, 26 aa, Artificial Sequence
  Cyclic GFR-binding peptide
  MOD_RES (6)..(7): Xaa is C or S
RVPSTXXAPVKTEPISMLYLDNGRVL

SEQ ID NO: 12992 - protein, 19 aa, Artificial Sequence
  Cyclic GFR-binding peptide
  MOD_RES (5)..(6): Xaa is C or S
IPEPXXVPEKMNAISILYF

SEQ ID NO: 12993 - protein, 19 aa, Artificial Sequence
  Cyclic GFR-binding peptide
SQDLSPINILYFIGKTPKI

SEQ ID NO: 12994 - protein, 18 aa, Artificial Sequence
  Cyclic GFR-binding peptide
  MOD_RES (4)..(5): Xaa is C or S
PEPXXVPEKMSPISILYK

SEQ ID NO: 12995 - protein, 14 aa, Artificial Sequence
  Cyclic GFR-binding peptide
  MOD_RES (1)..(1): Xaa is C or S
XVPTKLSATSILYY

SEQ ID NO: 12996 - protein, 25 aa, Artificial Sequence
  Cyclic GFR-binding peptide
  MOD_RES (6)..(7): Xaa is C or S
RVPSTXXAPVKTEPISMLYLDNGRV

SEQ ID NO: 12997 - protein, 27 aa, Artificial Sequence
  Cyclic GFR-binding peptide
  MOD_RES (6)..(7): Xaa is C or S
HVPKPXXAPTKLSPISVLYKDDSSNVI

SEQ ID NO: 12998 - protein, 17 aa, Artificial Sequence
  Cyclic GFR-binding peptide
  MOD_RES (3)..(4): Xaa is C or S
EPXXVPEKMSATSILYY

SEQ ID NO: 12999 - protein, 14 aa, Artificial Sequence
  Cyclic GFR-binding peptide
  MOD_RES (1)..(1): Xaa is C or S
XVPEKMNAISILYF

SEQ ID NO: 13000 - protein, 17 aa, Artificial Sequence
  Cyclic GFR-binding peptide
  MOD_RES (3)..(4): Xaa is C or S
KAXXVPTKLSATSILYY

SEQ ID NO: 13001 - protein, 13 aa, Artificial Sequence
  Cyclic GFR-binding peptide
VPARLSATSILYY

SEQ ID NO: 13002 - protein, 23 aa, Artificial Sequence
  Cyclic GFR-binding peptide
  MOD_RES (6)..(7): Xaa is C or S
ASASPXXVPQDLSPINILYFVGR

SEQ ID NO: 13003 - protein, 19 aa, Artificial Sequence
  Cyclic GFR-binding peptide
  MOD_RES (5)..(6): Xaa is C or S
IPEPXXVPEKMEPISILYL

SEQ ID NO: 13004 - protein, 24 aa, Artificial Sequence
  Cyclic GFR-binding peptide
  MOD_RES (6)..(7): Xaa is C or S
GIPEPXXVPEKMSPISILYKDENK

SEQ ID NO: 13005 - protein, 16 aa, Artificial Sequence
  Cyclic GFR-binding peptide
  MOD_RES (2)..(3): Xaa is C or S
TXXVPTRLSPISILYK

SEQ ID NO: 13006 - protein, 16 aa, Artificial Sequence
  Cyclic GFR-binding peptide
MNAISILYFDENKNVV

SEQ ID NO: 13007 - protein, 23 aa, Artificial Sequence
  Cyclic GFR-binding peptide
  MOD_RES (6)..(7): Xaa is C or S
HVPKPXXAPTKLSATSVLYYDDS

SEQ ID NO: 13008 - protein, 24 aa, Artificial Sequence
  Cyclic GFR-binding peptide
  MOD_RES (6)..(7): Xaa is C or S
STPPTXXVPTRLSPISILYKDSAN

SEQ ID NO: 13009 - protein, 24 aa, Artificial Sequence
  Cyclic GFR-binding peptide
  MOD_RES (6)..(7): Xaa is C or S
ASASPXXVPQDLSPINILYFVGRT

SEQ ID NO: 13010 - protein, 15 aa, Artificial Sequence
  Cyclic GFR-binding peptide
  MOD_RES (1)..(2): Xaa is C or S
XXVPTKLSATSILYY

SEQ ID NO: 13011 - protein, 25 aa, Artificial Sequence
  Cyclic GFR-binding peptide
  MOD_RES (6)..(7): Xaa is C or S
GIPEPXXVPEKMNAISILYFDENKN

SEQ ID NO: 13012 - protein, 17 aa, Artificial Sequence
  Cyclic GFR-binding peptide
KTSATSMLYYDNGRVLL

SEQ ID NO: 13013 - protein, 16 aa, Artificial Sequence
  Cyclic GFR-binding peptide
  MOD_RES (2)..(3): Xaa is C or S
PXXTPTKMEPISMLYL

SEQ ID NO: 13014 - protein, 20 aa, Artificial Sequence
  Cyclic GFR-binding peptide
  MOD_RES (6)..(7): Xaa is C or S
KASKAXXVPTKLSATSILYY

SEQ ID NO: 13015 - protein, 24 aa, Artificial Sequence
  Cyclic GFR-binding peptide
  MOD_RES (6)..(7): Xaa is C or S
KASKAXXVPTKLSATSILYYDKGV

SEQ ID NO: 13016 - protein, 23 aa, Artificial Sequence
  Cyclic GFR-binding peptide
  MOD_RES (6)..(7): Xaa is C or S
HVPKPXXAPTKLSPISVLYKDDS

SEQ ID NO: 13017 - protein, 19 aa, Artificial Sequence
  Cyclic GFR-binding peptide
  MOD_RES (5)..(6): Xaa is C or S
IPEPXXVPEKMSATSILYY

SEQ ID NO: 13018 - protein, 18 aa, Artificial Sequence
  Cyclic GFR-binding peptide
  MOD_RES (4)..(5): Xaa is C or S
PPTXXVPTRLSATSILYY

SEQ ID NO: 13019 - protein, 22 aa, Artificial Sequence
  Cyclic GFR-binding peptide
  MOD_RES (6)..(7): Xaa is C or S
GIPEPXXVPEKMSATSILYYDE

SEQ ID NO: 13020 - protein, 17 aa, Artificial Sequence
  Cyclic GFR-binding peptide
DLSPINILYFIGKTPKI

SEQ ID NO: 13021 - protein, 17 aa, Artificial Sequence
  Cyclic GFR-binding peptide
  MOD_RES (3)..(4): Xaa is C or S
EPXXVPEKMEPISILYL

SEQ ID NO: 13022 - protein, 26 aa, Artificial Sequence
  Cyclic GFR-binding peptide
  MOD_RES (6)..(7): Xaa is C or S
HVPKPXXAPTKLSPISVLYKDDSSNV

SEQ ID NO: 13023 - protein, 19 aa, Artificial Sequence
  Cyclic GFR-binding peptide
PQALSPINILYFVGRKPKV

SEQ ID NO: 13024 - protein, 26 aa, Artificial Sequence
  Cyclic GFR-binding peptide
  MOD_RES (6)..(7): Xaa is C or S
ASAAPXXVPQALSPINILYFVGRKPK

SEQ ID NO: 13025 - protein, 17 aa, Artificial Sequence
  Cyclic GFR-binding peptide
KMSPISMLYKNDKQQII

SEQ ID NO: 13026 - protein, 17 aa, Artificial Sequence
  Cyclic GFR-binding peptide
RLEPISILYLDSANNVV

SEQ ID NO: 13027 - protein, 18 aa, Artificial Sequence
  Cyclic GFR-binding peptide
QDLSPINILYFVGRTPKV

SEQ ID NO: 13028 - protein, 17 aa, Artificial Sequence
  Cyclic GFR-binding peptide
  MOD_RES (3)..(4): Xaa is C or S
GPXXTPTKMSPISMLYK

SEQ ID NO: 13029 - protein, 20 aa, Artificial Sequence
  Cyclic GFR-binding peptide
  MOD_RES (6)..(7): Xaa is C or S
GIPEPXXVPEKMEPISILYL

SEQ ID NO: 13030 - protein, 19 aa, Artificial Sequence
  Cyclic GFR-binding peptide
  MOD_RES (5)..(6): Xaa is C or S
TPPTXXVPTRLSPISILYK

SEQ ID NO: 13031 - protein, 25 aa, Artificial Sequence
  Cyclic GFR-binding peptide
  MOD_RES (6)..(7): Xaa is C or S
GIPEPXXVPEKMSPISILYKDENKN

SEQ ID NO: 13032 - protein, 17 aa, Artificial Sequence
  Cyclic GFR-binding peptide
KMEPISMLYLNDKQQII

SEQ ID NO: 13033 - protein, 17 aa, Artificial Sequence
  Cyclic GFR-binding peptide
ALSPINILYFVGRKPKV

SEQ ID NO: 13034 - protein, 17 aa, Artificial Sequence
  Cyclic GFR-binding peptide
RLSPISILYKDSANNVV

SEQ ID NO: 13035 - protein, 24 aa, Artificial Sequence
  Cyclic GFR-binding peptide
  MOD_RES (6)..(7): Xaa is C or S
HVPKPXXAPTKLSPISVLYKDDSS

SEQ ID NO: 13036 - protein, 13 aa, Artificial Sequence
  Cyclic GFR-binding peptide
VPEKMNAISILYF

SEQ ID NO: 13037 - protein, 20 aa, Artificial Sequence
  Cyclic GFR-binding peptide
  MOD_RES (6)..(7): Xaa is C or S
STPPTXXVPTRLSATSILYY

SEQ ID NO: 13038 - protein, 15 aa, Artificial Sequence
  Cyclic GFR-binding peptide
SATSILYYDENKNVV

SEQ ID NO: 13039 - protein, 23 aa, Artificial Sequence
  Cyclic GFR-binding peptide
  MOD_RES (6)..(7): Xaa is C or S
HVPKPXXAPTKLEPISVLYLDDS

SEQ ID NO: 13040 - protein, 23 aa, Artificial Sequence
  Cyclic GFR-binding peptide
  MOD_RES (6)..(7): Xaa is C or S
GIPEPXXVPEKMSPISILYKDEN

SEQ ID NO: 13041 - protein, 16 aa, Artificial Sequence
  Cyclic GFR-binding peptide
MEPISMLYLNDKQQII

SEQ ID NO: 13042 - protein, 26 aa, Artificial Sequence
  Cyclic GFR-binding peptide
  MOD_RES (6)..(7): Xaa is C or S
RVPSTXXAPVKTSATSMLYYDNGRVL

SEQ ID NO: 13043 - protein, 17 aa, Artificial Sequence
  Cyclic GFR-binding peptide
  MOD_RES (3)..(4): Xaa is C or S
EPXXVPEKMSPINILYF

SEQ ID NO: 13044 - protein, 19 aa, Artificial Sequence
  Cyclic GFR-binding peptide
PTKMEPISMLYLNDKQQII

SEQ ID NO: 13045 - protein, 24 aa, Artificial Sequence
  Cyclic GFR-binding peptide
  MOD_RES (6)..(7): Xaa is C or S
HVPKPXXAPTKLEPISVLYLDDSS

SEQ ID NO: 13046 - protein, 21 aa, Artificial Sequence
  Cyclic GFR-binding peptide
  MOD_RES (6)..(7): Xaa is C or S
GSAGPXXTPTKMEPISMLYLN

SEQ ID NO: 13047 - protein, 13 aa, Artificial Sequence
  Cyclic GFR-binding peptide
VPTRLSPISILYK

SEQ ID NO: 13048 - protein, 15 aa, Artificial Sequence
  Cyclic GFR-binding peptide
SATSILYYDAANNVV

SEQ ID NO: 13049 - protein, 19 aa, Artificial Sequence
  Cyclic GFR-binding peptide
  MOD_RES (5)..(6): Xaa is C or S
ASKAXXVPTKLSATSILYY

SEQ ID NO: 13050 - protein, 24 aa, Artificial Sequence
  Cyclic GFR-binding peptide
  MOD_RES (6)..(7): Xaa is C or S
GSAGPXXTPTKMSATSMLYYNDKQ

SEQ ID NO: 13051 - protein, 18 aa, Artificial Sequence
  Cyclic GFR-binding peptide
EKMSPISILYKDENKNVV

SEQ ID NO: 13052 - protein, 25 aa, Artificial Sequence
  Cyclic GFR-binding peptide
  MOD_RES (6)..(7): Xaa is C or S
HVPKPXXAPTKLSPISVLYKDDSSN

SEQ ID NO: 13053 - protein, 19 aa, Artificial Sequence
  Cyclic GFR-binding peptide
PTRLEPISILYLDSANNVV

SEQ ID NO: 13054 - protein, 17 aa, Artificial Sequence
  Cyclic GFR-binding peptide
  MOD_RES (3)..(4): Xaa is C or S
PTXXVPTRLSPISILYK

SEQ ID NO: 13055 - protein, 15 aa, Artificial Sequence
  Cyclic GFR-binding peptide
  MOD_RES (1)..(2): Xaa is C or S
XXTPTKMSATSMLYY

SEQ ID NO: 13056 - protein, 17 aa, Artificial Sequence
  Cyclic GFR-binding peptide
RLSATSILYYDSANNVV

SEQ ID NO: 13057 - protein, 23 aa, Artificial Sequence
  Cyclic GFR-binding peptide
  MOD_RES (6)..(7): Xaa is C or S
RVPSTXXAPVKTSPISMLYKDNG

SEQ ID NO: 13058 - protein, 23 aa, Artificial Sequence
  Cyclic GFR-binding peptide
  MOD_RES (6)..(7): Xaa is C or S
GIPEPXXVPEKMSATSILYYDEN

SEQ ID NO: 13059 - protein, 15 aa, Artificial Sequence
  Cyclic GFR-binding peptide
  MOD_RES (1)..(2): Xaa is C or S
XXVPQALSPINILYF

SEQ ID NO: 13060 - protein, 19 aa, Artificial Sequence
  Cyclic GFR-binding peptide
PVKTSPISMLYKDNGRVLL

SEQ ID NO: 13061 - protein, 27 aa, Artificial Sequence
  Cyclic GFR-binding peptide
  MOD_RES (6)..(7): Xaa is C or S
ASAAPXXVPQALSPINILYFVGRKPKV

SEQ ID NO: 13062 - protein, 24 aa, Artificial Sequence
  Cyclic GFR-binding peptide
  MOD_RES (6)..(7): Xaa is C or S
HVPKPXXAPTKLSATSVLYYDDSS

SEQ ID NO: 13063 - protein, 17 aa, Artificial Sequence
  Cyclic GFR-binding peptide
KMSPISILYKDENKNVV

SEQ ID NO: 13064 - protein, 18 aa, Artificial Sequence
  Cyclic GFR-binding peptide
  MOD_RES (4)..(5): Xaa is C or S
PASXXVPARLSATSILYY

SEQ ID NO: 13065 - protein, 18 aa, Artificial Sequence
  Cyclic GFR-binding peptide
TRLEPISILYLDSANNVV

SEQ ID NO: 13066 - protein, 18 aa, Artificial Sequence
  Cyclic GFR-binding peptide
  MOD_RES (4)..(5): Xaa is C or S
AAPXXVPQALSPINILYF

SEQ ID NO: 13067 - protein, 15 aa, Artificial Sequence
  Cyclic GFR-binding peptide
  MOD_RES (1)..(2): Xaa is C or S
XXVPEKMSPINILYF

SEQ ID NO: 13068 - protein, 25 aa, Artificial Sequence
  Cyclic GFR-binding peptide
  MOD_RES (6)..(7): Xaa is C or S
GIPEPXXVPEKMEPISILYLDENKN

SEQ ID NO: 13069 - protein, 23 aa, Artificial Sequence
  Cyclic GFR-binding peptide
  MOD_RES (6)..(7): Xaa is C or S
STPPTXXVPTRLSPISILYKDSA

SEQ ID NO: 13070 - protein, 26 aa, Artificial Sequence
  Cyclic GFR-binding peptide
  MOD_RES (6)..(7): Xaa is C or S
GIPEPXXVPEKMSATSILYYDENKNV

SEQ ID NO: 13071 - protein, 18 aa, Artificial Sequence
  Cyclic GFR-binding peptide
TKMEPISMLYLNDKQQII

SEQ ID NO: 13072 - protein, 17 aa, Artificial Sequence
  Cyclic GFR-binding peptide
KTSPISMLYKDNGRVLL

SEQ ID NO: 13073 - protein, 20 aa, Artificial Sequence
  Cyclic GFR-binding peptide
  MOD_RES (6)..(7): Xaa is C or S
GIPEPXXVPEKMSPISILYK

SEQ ID NO: 13074 - protein, 27 aa, Artificial Sequence
  Cyclic GFR-binding peptide
  MOD_RES (6)..(7): Xaa is C or S
STPPTXXVPTRLSPISILYKDSANNVV

SEQ ID NO: 13075 - protein, 23 aa, Artificial Sequence
  Cyclic GFR-binding peptide
  MOD_RES (6)..(7): Xaa is C or S
KASKAXXVPTKLSATSILYYDKG

SEQ ID NO: 13076 - protein, 17 aa, Artificial Sequence
  Cyclic GFR-binding peptide
KMSATSMLYYNDKQQII

SEQ ID NO: 13077 - protein, 21 aa, Artificial Sequence
  Cyclic GFR-binding peptide
  MOD_RES (6)..(7): Xaa is C or S
ASASPXXVPQDLSPINILYFV

SEQ ID NO: 13078 - protein, 24 aa, Artificial Sequence
  Cyclic GFR-binding peptide
  MOD_RES (6)..(7): Xaa is C or S
GSAGPXXTPTKMEPISMLYLNDKQ

SEQ ID NO: 13079 - protein, 24 aa, Artificial Sequence
  Cyclic GFR-binding peptide
  MOD_RES (6)..(7): Xaa is C or S
GSAGPXXTPTKMSPISMLYKNDKQ

SEQ ID NO: 13080 - protein, 27 aa, Artificial Sequence
  Cyclic GFR-binding peptide
  MOD_RES (6)..(7): Xaa is C or S
RVPSTXXAPVKTSATSMLYYDNGRVLL

SEQ ID NO: 13081 - protein, 23 aa, Artificial Sequence
  Cyclic GFR-binding peptide
  MOD_RES (6)..(7): Xaa is C or S
RVPSTXXAPVKTSATSMLYYDNG

SEQ ID NO: 13082 - protein, 23 aa, Artificial Sequence
  Cyclic GFR-binding peptide
  MOD_RES (6)..(7): Xaa is C or S
ASAAPXXVPQALSPINILYFVGR

SEQ ID NO: 13083 - protein, 18 aa, Artificial Sequence
  Cyclic GFR-binding peptide
QALSPINILYFVGRKPKV

SEQ ID NO: 13084 - protein, 16 aa, Artificial Sequence
  Cyclic GFR-binding peptide
MEPISILYLDENKNVV

SEQ ID NO: 13085 - protein, 14 aa, Artificial Sequence
  Cyclic GFR-binding peptide
  MOD_RES (1)..(1): Xaa is C or S
XTPTKMSATSMLYY

SEQ ID NO: 13086 - protein, 15 aa, Artificial Sequence
  Cyclic GFR-binding peptide
  MOD_RES (1)..(2): Xaa is C or S
XXTPTKMSPISMLYK

SEQ ID NO: 13087 - protein, 16 aa, Artificial Sequence
  Cyclic GFR-binding peptide
  MOD_RES (2)..(3): Xaa is C or S
PXXVSQDLSPINILYF

SEQ ID NO: 13088 - protein, 27 aa, Artificial Sequence
  Cyclic GFR-binding peptide
  MOD_RES (6)..(7): Xaa is C or S
HVPKPXXAPTKLSATSVLYYDDSSNVI

SEQ ID NO: 13089 - protein, 23 aa, Artificial Sequence
  Cyclic GFR-binding peptide
  MOD_RES (6)..(7): Xaa is C or S
GSAGPXXTPTKMSATSMLYYNDK

SEQ ID NO: 13090 - protein, 21 aa, Artificial Sequence
  Cyclic GFR-binding peptide
  MOD_RES (6)..(7): Xaa is C or S
RVPSTXXAPVKTSPISMLYKD

SEQ ID NO: 13091 - protein, 23 aa, Artificial Sequence
  Cyclic GFR-binding peptide
  MOD_RES (6)..(7): Xaa is C or S
GSAGPXXTPTKMSPISMLYKNDK

SEQ ID NO: 13092 - protein, 16 aa, Artificial Sequence
  Cyclic GFR-binding peptide
LSPISILYKDSANNVV

SEQ ID NO: 13093 - protein, 24 aa, Artificial Sequence
  Cyclic GFR-binding peptide
  MOD_RES (6)..(7): Xaa is C or S
AAPASXXVPARLSATSILYYDAAN

SEQ ID NO: 13094 - protein, 15 aa, Artificial Sequence
  Cyclic GFR-binding peptide
SPISILYKDENKNVV

SEQ ID NO: 13095 - protein, 19 aa, Artificial Sequence
  Cyclic GFR-binding peptide
PEKMSPISILYKDENKNVV

SEQ ID NO: 13096 - protein, 21 aa, Artificial Sequence
  Cyclic GFR-binding peptide
  MOD_RES (6)..(7): Xaa is C or S
GIPEPXXVPEKMNAISILYFD

SEQ ID NO: 13097 - protein, 21 aa, Artificial Sequence
  Cyclic GFR-binding peptide
  MOD_RES (6)..(7): Xaa is C or S
HVPKPXXAPTKLEPISVLYLD

SEQ ID NO: 13098 - protein, 17 aa, Artificial Sequence
  Cyclic GFR-binding peptide
  MOD_RES (3)..(4): Xaa is C or S
SPXXVSQDLSPINILYF

SEQ ID NO: 13099 - protein, 16 aa, Artificial Sequence
  Cyclic GFR-binding peptide
TSATSMLYYDNGRVLL

SEQ ID NO: 13100 - protein, 20 aa, Artificial Sequence
  Cyclic GFR-binding peptide
  MOD_RES (6)..(7): Xaa is C or S
ASASPXXVPQDLSPINILYF

SEQ ID NO: 13101 - protein, 15 aa, Artificial Sequence
  Cyclic GFR-binding peptide
SATSMLYYNDKQQII

SEQ ID NO: 13102 - protein, 19 aa, Artificial Sequence
  Cyclic GFR-binding peptide
  MOD_RES (5)..(6): Xaa is C or S
SAAPXXVPQALSPINILYF

SEQ ID NO: 13103 - protein, 22 aa, Artificial Sequence
  Cyclic GFR-binding peptide
  MOD_RES (6)..(7): Xaa is C or S
ASASPXXVSQDLSPINILYFIG

SEQ ID NO: 13104 - protein, 14 aa, Artificial Sequence
  Cyclic GFR-binding peptide
  MOD_RES (1)..(1): Xaa is C or S
XTPTKMSPISMLYK

SEQ ID NO: 13105 - protein, 21 aa, Artificial Sequence
  Cyclic GFR-binding peptide
  MOD_RES (6)..(7): Xaa is C or S
ASASPXXVSQDLSPINILYFI

SEQ ID NO: 13106 - protein, 14 aa, Artificial Sequence
  Cyclic GFR-binding peptide
  MOD_RES (1)..(1): Xaa is C or S
XVPEKMSPINILYF

SEQ ID NO: 13107 - protein, 15 aa, Artificial Sequence
  Cyclic GFR-binding peptide
LLVRGNDMIQMTINS

SEQ ID NO: 13108 - protein, 27 aa, Artificial Sequence
  Cyclic GFR-binding peptide
  MOD_RES (21)..(22): Xaa is C or S
LLVRGNDMIQMTINSTKVPAXXTSPVR

SEQ ID NO: 13109 - protein, 14 aa, Artificial Sequence
  Cyclic GFR-binding peptide
  MOD_RES (14)..(14): Xaa is C or S
MIQMTINSMKTPTX

SEQ ID NO: 13110 - protein, 27 aa, Artificial Sequence
  Cyclic GFR-binding peptide
  MOD_RES (21)..(22): Xaa is C or S
VVNNAADMIQITINSLRAPVXXSAPAA

SEQ ID NO: 13111 - protein, 24 aa, Artificial Sequence
  Cyclic GFR-binding peptide
  MOD_RES (18)..(19): Xaa is C or S
NAADMIQITINSLRAPVXXSAPAA

SEQ ID NO: 13112 - protein, 16 aa, Artificial Sequence
  Cyclic GFR-binding peptide
  MOD_RES (14)..(15): Xaa is C or S
MIQMTINSTKVPAXXT

SEQ ID NO: 13113 - protein, 23 aa, Artificial Sequence
  Cyclic GFR-binding peptide
  MOD_RES (17)..(18): Xaa is C or S
KDNMIQMTINSMKTPTXXPGASG

SEQ ID NO: 13114 - protein, 16 aa, Artificial Sequence
  Cyclic GFR-binding peptide
IIQQKDNMIQMTINSM

SEQ ID NO: 13115 - protein, 24 aa, Artificial Sequence
  Cyclic GFR-binding peptide
  MOD_RES (18)..(19): Xaa is C or S
QKDNMIQMTINSMKTPTXXPGASG

SEQ ID NO: 13116 - protein, 13 aa, Artificial Sequence
  Cyclic GFR-binding peptide
MIQMTINSTKVPA

SEQ ID NO: 13117 - protein, 23 aa, Artificial Sequence
  Cyclic GFR-binding peptide
  MOD_RES (17)..(18): Xaa is C or S
AADMIQITINSLRAPVXXSAPAA

SEQ ID NO: 13118 - protein, 22 aa, Artificial Sequence
  Cyclic GFR-binding peptide
  MOD_RES (16)..(17): Xaa is C or S
ADMIQITINSLRAPVXXSAPAA

SEQ ID NO: 13119 - protein, 16 aa, Artificial Sequence
  Cyclic GFR-binding peptide
  MOD_RES (14)..(15): Xaa is C or S
MIQITINSLRAPVXXS

SEQ ID NO: 13120 - protein, 15 aa, Artificial Sequence
  Cyclic GFR-binding peptide
VVNNAADMIQITINS

SEQ ID NO: 13121 - protein, 15 aa, Artificial Sequence
  Cyclic GFR-binding peptide
  MOD_RES (14)..(15): Xaa is C or S
MIQMTINSTKVPAXX

SEQ ID NO: 13122 - protein, 24 aa, Artificial Sequence
  Cyclic GFR-binding peptide
  MOD_RES (18)..(19): Xaa is C or S
SSDDMIQVTINSLKTPAXXPKPVH

SEQ ID NO: 13123 - protein, 15 aa, Artificial Sequence
  Cyclic GFR-binding peptide
VVNNASDMIQITINS

SEQ ID NO: 13124 - protein, 25 aa, Artificial Sequence
  Cyclic GFR-binding peptide
  MOD_RES (19)..(20): Xaa is C or S
NSSDDMIQVTINSLKTPAXXPKPVH

SEQ ID NO: 13125 - protein, 15 aa, Artificial Sequence
  Cyclic GFR-binding peptide
  MOD_RES (14)..(15): Xaa is C or S
MIQITINSLRTPVXX

SEQ ID NO: 13126 - protein, 27 aa, Artificial Sequence
  Cyclic GFR-binding peptide
  MOD_RES (21)..(22): Xaa is C or S
IVNSSDDMIQVTINSLKTPAXXPKPVH

SEQ ID NO: 13127 - protein, 23 aa, Artificial Sequence
  Cyclic GFR-binding peptide
  MOD_RES (17)..(18): Xaa is C or S
SDDMIQVTINSLKTPAXXPKPVH

SEQ ID NO: 13128 - protein, 19 aa, Artificial Sequence
  Cyclic GFR-binding peptide
IIQQKDNMIQMTINSMKTP

SEQ ID NO: 13129 - protein, 22 aa, Artificial Sequence
  Cyclic GFR-binding peptide
  MOD_RES (16)..(17): Xaa is C or S
SDMIQITINSLRTPVXXTPPTS

SEQ ID NO: 13130 - protein, 25 aa, Artificial Sequence
  Cyclic GFR-binding peptide
  MOD_RES (19)..(20): Xaa is C or S
QQKDNMIQMTINSMKTPTXXPGASG

SEQ ID NO: 13131 - protein, 26 aa, Artificial Sequence
  Cyclic GFR-binding peptide
  MOD_RES (20)..(21): Xaa is C or S
VNSSDDMIQVTINSLKTPAXXPKPVH

SEQ ID NO: 13132 - protein, 19 aa, Artificial Sequence
  Cyclic GFR-binding peptide
  MOD_RES (14)..(15): Xaa is C or S
MIQMTINSTKVPAXXTSPV

SEQ ID NO: 13133 - protein, 17 aa, Artificial Sequence
  Cyclic GFR-binding peptide
  MOD_RES (14)..(15): Xaa is C or S
MIQITINSLRAPVXXSA

SEQ ID NO: 13134 - protein, 21 aa, Artificial Sequence
  Cyclic GFR-binding peptide
  MOD_RES (15)..(16): Xaa is C or S
DMIQVTINSLKTPAXXPKPVH

SEQ ID NO: 13135 - protein, 20 aa, Artificial Sequence
  Cyclic GFR-binding peptide
  MOD_RES (14)..(15): Xaa is C or S
MIQMTINSTKVPAXXTSPVR

SEQ ID NO: 13136 - protein, 25 aa, Artificial Sequence
  Cyclic GFR-binding peptide
  MOD_RES (19)..(20): Xaa is C or S
VRGNDMIQMTINSTKVPAXXTSPVR

SEQ ID NO: 13137 - protein, 19 aa, Artificial Sequence
  Cyclic GFR-binding peptide
VVNNASDMIQITINSLRTP

SEQ ID NO: 13138 - protein, 27 aa, Artificial Sequence
  Cyclic GFR-binding peptide
  MOD_RES (21)..(22): Xaa is C or S
IIQQKDNMIQMTINSMKTPTXXPGASG

SEQ ID NO: 13139 - protein, 20 aa, Artificial Sequence
  Cyclic GFR-binding peptide
  MOD_RES (14)..(15): Xaa is C or S
MIQMTINSMKTPTXXPGASG

SEQ ID NO: 13140 - protein, 14 aa, Artificial Sequence
  Cyclic GFR-binding peptide
  MOD_RES (14)..(14): Xaa is C or S
MIQITINSLRTPVX

SEQ ID NO: 13141 - protein, 13 aa, Artificial Sequence
  Cyclic GFR-binding peptide
MIQITINSLRAPV

SEQ ID NO: 13142 - protein, 20 aa, Artificial Sequence
  Cyclic GFR-binding peptide
  MOD_RES (14)..(15): Xaa is C or S
MIQVTINSLKTPAXXPKPVH

SEQ ID NO: 13143 - protein, 16 aa, Artificial Sequence
  Cyclic GFR-binding peptide
LLVRGNDMIQMTINST

SEQ ID NO: 13144 - protein, 27 aa, Artificial Sequence
  Cyclic GFR-binding peptide
  MOD_RES (21)..(22): Xaa is C or S
VVNNASDMIQITINSLRTPVXXTPPTS

SEQ ID NO: 13145 - protein, 24 aa, Artificial Sequence
  Cyclic GFR-binding peptide
  MOD_RES (18)..(19): Xaa is C or S
RGNDMIQMTINSTKVPAXXTSPVR

SEQ ID NO: 13146 - protein, 15 aa, Artificial Sequence
  Cyclic GFR-binding peptide
IIQQKDNMIQMTINS

SEQ ID NO: 13147 - protein, 18 aa, Artificial Sequence
  Cyclic GFR-binding peptide
  MOD_RES (14)..(15): Xaa is C or S
MIQITINSLRAPVXXSAP

SEQ ID NO: 13148 - protein, 16 aa, Artificial Sequence
  Cyclic GFR-binding peptide
VVNNAADMIQITINSL

SEQ ID NO: 13149 - protein, 14 aa, Artificial Sequence
  Cyclic GFR-binding peptide
  MOD_RES (14)..(14): Xaa is C or S
MIQMTINSTKVPAX

SEQ ID NO: 13150 - protein, 17 aa, Artificial Sequence
  Cyclic GFR-binding peptide
LLVRGNDMIQMTINSTK

SEQ ID NO: 13151 - protein, 19 aa, Artificial Sequence
  Cyclic GFR-binding peptide
  MOD_RES (14)..(15): Xaa is C or S
MIQITINSLRTPVXXTPPT

SEQ ID NO: 13152 - protein, 17 aa, Artificial Sequence
  Cyclic GFR-binding peptide
VVNNASDMIQITINSLR

SEQ ID NO: 13153 - protein, 16 aa, Artificial Sequence
  Cyclic GFR-binding peptide
VVNNASDMIQITINSL

SEQ ID NO: 13154 - protein, 22 aa, Artificial Sequence
  Cyclic GFR-binding peptide
  MOD_RES (16)..(17): Xaa is C or S
DDMIQVTINSLKTPAXXPKPVH

SEQ ID NO: 13155 - protein, 21 aa, Artificial Sequence
  Cyclic GFR-binding peptide
  MOD_RES (15)..(16): Xaa is C or S
DMIQITINSLRTPVXXTPPTS

SEQ ID NO: 13156 - protein, 21 aa, Artificial Sequence
  Cyclic GFR-binding peptide
  MOD_RES (15)..(16): Xaa is C or S
DMIQITINSLRAPVXXSAPAA

SEQ ID NO: 13157 - protein, 18 aa, Artificial Sequence
  Cyclic GFR-binding peptide
  MOD_RES (14)..(15): Xaa is C or S
MIQMTINSMKTPTXXPGA

SEQ ID NO: 13158 - protein, 16 aa, Artificial Sequence
  Cyclic GFR-binding peptide
  MOD_RES (14)..(15): Xaa is C or S
MIQMTINSMKTPTXXP

SEQ ID NO: 13159 - protein, 25 aa, Artificial Sequence
  Cyclic GFR-binding peptide
  MOD_RES (19)..(20): Xaa is C or S
NNAADMIQITINSLRAPVXXSAPAA

SEQ ID NO: 13160 - protein, 15 aa, Artificial Sequence
  Cyclic GFR-binding peptide
  MOD_RES (14)..(15): Xaa is C or S
MIQITINSLRAPVXX

SEQ ID NO: 13161 - protein, 26 aa, Artificial Sequence
  Cyclic GFR-binding peptide
  MOD_RES (20)..(21): Xaa is C or S
IQQKDNMIQMTINSMKTPTXXPGASG

SEQ ID NO: 13162 - protein, 18 aa, Artificial Sequence
  Cyclic GFR-binding peptide
LLVRGNDMIQMTINSTKV

SEQ ID NO: 13163 - protein, 13 aa, Artificial Sequence
  Cyclic GFR-binding peptide
MIQITINSLRTPV

SEQ ID NO: 13164 - protein, 15 aa, Artificial Sequence
  Cyclic GFR-binding peptide
  MOD_RES (14)..(15): Xaa is C or S
MIQMTINSMKTPTXX

SEQ ID NO: 13165 - protein, 25 aa, Artificial Sequence
  Cyclic GFR-binding peptide
  MOD_RES (19)..(20): Xaa is C or S
NNASDMIQITINSLRTPVXXTPPTS

SEQ ID NO: 13166 - protein, 16 aa, Artificial Sequence
  Cyclic GFR-binding peptide
  MOD_RES (14)..(15): Xaa is C or S
MIQITINSLRTPVXXT

SEQ ID NO: 13167 - protein, 18 aa, Artificial Sequence
  Cyclic GFR-binding peptide
VVNNASDMIQITINSLRT

SEQ ID NO: 13168 - protein, 26 aa, Artificial Sequence
  Cyclic GFR-binding peptide
  MOD_RES (20)..(21): Xaa is C or S
VNNASDMIQITINSLRTPVXXTPPTS

SEQ ID NO: 13169 - protein, 18 aa, Artificial Sequence
  Cyclic GFR-binding peptide
  MOD_RES (14)..(15): Xaa is C or S
MIQITINSLRTPVXXTPP

SEQ ID NO: 13170 - protein, 17 aa, Artificial Sequence
  Cyclic GFR-binding peptide
  MOD_RES (14)..(15): Xaa is C or S
MIQMTINSMKTPTXXPG

SEQ ID NO: 13171 - protein, 13 aa, Artificial Sequence
  Cyclic GFR-binding peptide
MIQMTINSMKTPT

SEQ ID NO: 13172 - protein, 18 aa, Artificial Sequence
  Cyclic GFR-binding peptide
VVNNAADMIQITINSLRA

SEQ ID NO: 13173 - protein, 22 aa, Artificial Sequence
  Cyclic GFR-binding peptide
  MOD_RES (16)..(17): Xaa is C or S
NDMIQMTINSTKVPAXXTSPVR

SEQ ID NO: 13174 - protein, 24 aa, Artificial Sequence
  Cyclic GFR-binding peptide
  MOD_RES (18)..(19): Xaa is C or S
NASDMIQITINSLRTPVXXTPPTS

SEQ ID NO: 13175 - protein, 18 aa, Artificial Sequence
  Cyclic GFR-binding peptide
  MOD_RES (14)..(15): Xaa is C or S
MIQMTINSTKVPAXXTSP

SEQ ID NO: 13176 - protein, 17 aa, Artificial Sequence
  Cyclic GFR-binding peptide
VVNNAADMIQITINSLR

SEQ ID NO: 13177 - protein, 17 aa, Artificial Sequence
  Cyclic GFR-binding peptide
  MOD_RES (14)..(15): Xaa is C or S
MIQMTINSTKVPAXXTS

SEQ ID NO: 13178 - protein, 23 aa, Artificial Sequence
  Cyclic GFR-binding peptide
  MOD_RES (17)..(18): Xaa is C or S
GNDMIQMTINSTKVPAXXTSPVR

SEQ ID NO: 13179 - protein, 17 aa, Artificial Sequence
  Cyclic GFR-binding peptide
IIQQKDNMIQMTINSMK

SEQ ID NO: 13180 - protein, 21 aa, Artificial Sequence
  Cyclic GFR-binding peptide
  MOD_RES (15)..(16): Xaa is C or S
DMIQMTINSTKVPAXXTSPVR

SEQ ID NO: 13181 - protein, 19 aa, Artificial Sequence
  Cyclic GFR-binding peptide
VVNNAADMIQITINSLRAP

SEQ ID NO: 13182 - protein, 26 aa, Artificial Sequence
  Cyclic GFR-binding peptide
  MOD_RES (20)..(21): Xaa is C or S
LVRGNDMIQMTINSTKVPAXXTSPVR

SEQ ID NO: 13183 - protein, 19 aa, Artificial Sequence
  Cyclic GFR-binding peptide
  MOD_RES (14)..(15): Xaa is C or S
MIQITINSLRAPVXXSAPA

SEQ ID NO: 13184 - protein, 17 aa, Artificial Sequence
  Cyclic GFR-binding peptide
  MOD_RES (14)..(15): Xaa is C or S
MIQITINSLRTPVXXTP

SEQ ID NO: 13185 - protein, 22 aa, Artificial Sequence
  Cyclic GFR-binding peptide
  MOD_RES (16)..(17): Xaa is C or S
DNMIQMTINSMKTPTXXPGASG

SEQ ID NO: 13186 - protein, 18 aa, Artificial Sequence
  Cyclic GFR-binding peptide
IIQQKDNMIQMTINSMKT

SEQ ID NO: 13187 - protein, 20 aa, Artificial Sequence
  Cyclic GFR-binding peptide
  MOD_RES (14)..(15): Xaa is C or S
MIQITINSLRTPVXXTPPTS

SEQ ID NO: 13188 - protein, 21 aa, Artificial Sequence
  Cyclic GFR-binding peptide
  MOD_RES (15)..(16): Xaa is C or S
NMIQMTINSMKTPTXXPGASG

SEQ ID NO: 13189 - protein, 14 aa, Artificial Sequence
  Cyclic GFR-binding peptide
  MOD_RES (14)..(14): Xaa is C or S
MIQITINSLRAPVX

SEQ ID NO: 13190 - protein, 26 aa, Artificial Sequence
  Cyclic GFR-binding peptide
  MOD_RES (20)..(21): Xaa is C or S
VNNAADMIQITINSLRAPVXXSAPAA

SEQ ID NO: 13191 - protein, 23 aa, Artificial Sequence
  Cyclic GFR-binding peptide
  MOD_RES (17)..(18): Xaa is C or S
ASDMIQITINSLRTPVXXTPPTS

SEQ ID NO: 13192 - protein, 19 aa, Artificial Sequence
  Cyclic GFR-binding peptide
  MOD_RES (14)..(15): Xaa is C or S
MIQMTINSMKTPTXXPGAS

SEQ ID NO: 13193 - protein, 19 aa, Artificial Sequence
  Cyclic GFR-binding peptide
LLVRGNDMIQMTINSTKVP

SEQ ID NO: 13194 - protein, 20 aa, Artificial Sequence
  Cyclic GFR-binding peptide
  MOD_RES (14)..(15): Xaa is C or S
MIQITINSLRAPVXXSAPAA

SEQ ID NO: 13195 - protein, 15 aa, Artificial Sequence
  Cyclic GFR-binding peptide
SNITMQIMDNGRVLL

SEQ ID NO: 13196 - protein, 27 aa, Artificial Sequence
  Cyclic GFR-binding peptide
  MOD_RES (6)..(7): Xaa is C or S
RVPSTXXAPVKTSNITMQIMDNGRVLL

SEQ ID NO: 13197 - protein, 14 aa, Artificial Sequence
  Cyclic GFR-binding peptide
  MOD_RES (1)..(1): Xaa is C or S
XTPTKMSNITMQIM

SEQ ID NO: 13198 - protein, 27 aa, Artificial Sequence
  Cyclic GFR-binding peptide
  MOD_RES (6)..(7): Xaa is C or S
AAPASXXVPARLSNITIQIMDAANNVV

SEQ ID NO: 13199 - protein, 24 aa, Artificial Sequence
  Cyclic GFR-binding peptide
  MOD_RES (6)..(7): Xaa is C or S
AAPASXXVPARLSNITIQIMDAAN

SEQ ID NO: 13200 - protein, 16 aa, Artificial Sequence
  Cyclic GFR-binding peptide
  MOD_RES (2)..(3): Xaa is C or S
TXXAPVKTSNITMQIM

SEQ ID NO: 13201 - protein, 23 aa, Artificial Sequence
  Cyclic GFR-binding peptide
  MOD_RES (6)..(7): Xaa is C or S
GSAGPXXTPTKMSNITMQIMNDK

SEQ ID NO: 13202 - protein, 16 aa, Artificial Sequence
  Cyclic GFR-binding peptide
MSNITMQIMNDKQQII

SEQ ID NO: 13203 - protein, 24 aa, Artificial Sequence
  Cyclic GFR-binding peptide
  MOD_RES (6)..(7): Xaa is C or S
GSAGPXXTPTKMSNITMQIMNDKQ

SEQ ID NO: 13204 - protein, 13 aa, Artificial Sequence
  Cyclic GFR-binding peptide
APVKTSNITMQIM

SEQ ID NO: 13205 - protein, 23 aa, Artificial Sequence
  Cyclic GFR-binding peptide
  MOD_RES (6)..(7): Xaa is C or S
AAPASXXVPARLSNITIQIMDAA

SEQ ID NO: 13206 - protein, 22 aa, Artificial Sequence
  Cyclic GFR-binding peptide
  MOD_RES (6)..(7): Xaa is C or S
AAPASXXVPARLSNITIQIMDA

SEQ ID NO: 13207 - protein, 16 aa, Artificial Sequence
  Cyclic GFR-binding peptide
  MOD_RES (2)..(3): Xaa is C or S
SXXVPARLSNITIQIM

SEQ ID NO: 13208 - protein, 15 aa, Artificial Sequence
  Cyclic GFR-binding peptide
SNITIQIMDAANNVV

SEQ ID NO: 13209 - protein, 15 aa, Artificial Sequence
  Cyclic GFR-binding peptide
  MOD_RES (1)..(2): Xaa is C or S
XXAPVKTSNITMQIM

SEQ ID NO: 13210 - protein, 24 aa, Artificial Sequence
  Cyclic GFR-binding peptide
  MOD_RES (6)..(7): Xaa is C or S
HVPKPXXAPTKLSNITVQIMDDSS

SEQ ID NO: 13211 - protein, 15 aa, Artificial Sequence
  Cyclic GFR-binding peptide
SNITIQIMDSANNVV

SEQ ID NO: 13212 - protein, 25 aa, Artificial Sequence
  Cyclic GFR-binding peptide
  MOD_RES (6)..(7): Xaa is C or S
HVPKPXXAPTKLSNITVQIMDDSSN

SEQ ID NO: 13213 - protein, 15 aa, Artificial Sequence
  Cyclic GFR-binding peptide
  MOD_RES (1)..(2): Xaa is C or S
XXVPTRLSNITIQIM

SEQ ID NO: 13214 - protein, 27 aa, Artificial Sequence
  Cyclic GFR-binding peptide
  MOD_RES (6)..(7): Xaa is C or S
HVPKPXXAPTKLSNITVQIMDDSSNVI

SEQ ID NO: 13215 - protein, 23 aa, Artificial Sequence
  Cyclic GFR-binding peptide
  MOD_RES (6)..(7): Xaa is C or S
HVPKPXXAPTKLSNITVQIMDDS

SEQ ID NO: 13216 - protein, 19 aa, Artificial Sequence
  Cyclic GFR-binding peptide
PTKMSNITMQIMNDKQQII

SEQ ID NO: 13217 - protein, 22 aa, Artificial Sequence
  Cyclic GFR-binding peptide
  MOD_RES (6)..(7): Xaa is C or S
STPPTXXVPTRLSNITIQIMDS

SEQ ID NO: 13218 - protein, 25 aa, Artificial Sequence
  Cyclic GFR-binding peptide
  MOD_RES (6)..(7): Xaa is C or S
GSAGPXXTPTKMSNITMQIMNDKQQ

SEQ ID NO: 13219 - protein, 26 aa, Artificial Sequence
  Cyclic GFR-binding peptide
  MOD_RES (6)..(7): Xaa is C or S
HVPKPXXAPTKLSNITVQIMDDSSNV

SEQ ID NO: 13220 - protein, 19 aa, Artificial Sequence
  Cyclic GFR-binding peptide
  MOD_RES (5)..(6): Xaa is C or S
VPSTXXAPVKTSNITMQIM

SEQ ID NO: 13221 - protein, 17 aa, Artificial Sequence
  Cyclic GFR-binding peptide
  MOD_RES (3)..(4): Xaa is C or S
ASXXVPARLSNITIQIM

SEQ ID NO: 13222 - protein, 21 aa, Artificial Sequence
  Cyclic GFR-binding peptide
  MOD_RES (6)..(7): Xaa is C or S
HVPKPXXAPTKLSNITVQIMD

SEQ ID NO: 13223 - protein, 20 aa, Artificial Sequence
  Cyclic GFR-binding peptide
  MOD_RES (6)..(7): Xaa is C or S
RVPSTXXAPVKTSNITMQIM

SEQ ID NO: 13224 - protein, 25 aa, Artificial Sequence
  Cyclic GFR-binding peptide
  MOD_RES (6)..(7): Xaa is C or S
RVPSTXXAPVKTSNITMQIMDNGRV

SEQ ID NO: 13225 - protein, 19 aa, Artificial Sequence
  Cyclic GFR-binding peptide
PTRLSNITIQIMDSANNVV

SEQ ID NO: 13226 - protein, 27 aa, Artificial Sequence
  Cyclic GFR-binding peptide
  MOD_RES (6)..(7): Xaa is C or S
GSAGPXXTPTKMSNITMQIMNDKQQII

SEQ ID NO: 13227 - protein, 20 aa, Artificial Sequence
  Cyclic GFR-binding peptide
  MOD_RES (6)..(7): Xaa is C or S
GSAGPXXTPTKMSNITMQIM

SEQ ID NO: 13228 - protein, 14 aa, Artificial Sequence
  Cyclic GFR-binding peptide
  MOD_RES (1)..(1): Xaa is C or S
XVPTRLSNITIQIM

SEQ ID NO: 13229 - protein, 13 aa, Artificial Sequence
  Cyclic GFR-binding peptide
VPARLSNITIQIM

SEQ ID NO: 13230 - protein, 20 aa, Artificial Sequence
  Cyclic GFR-binding peptide
  MOD_RES (6)..(7): Xaa is C or S
HVPKPXXAPTKLSNITVQIM

SEQ ID NO: 13231 - protein, 16 aa, Artificial Sequence
  Cyclic GFR-binding peptide
TSNITMQIMDNGRVLL

SEQ ID NO: 13232 - protein, 27 aa, Artificial Sequence
  Cyclic GFR-binding peptide
  MOD_RES (6)..(7): Xaa is C or S
STPPTXXVPTRLSNITIQIMDSANNVV

SEQ ID NO: 13233 - protein, 24 aa, Artificial Sequence
  Cyclic GFR-binding peptide
  MOD_RES (6)..(7): Xaa is C or S
RVPSTXXAPVKTSNITMQIMDNGR

SEQ ID NO: 13234 - protein, 15 aa, Artificial Sequence
  Cyclic GFR-binding peptide
SNITMQIMNDKQQII

SEQ ID NO: 13235 - protein, 18 aa, Artificial Sequence
  Cyclic GFR-binding peptide
  MOD_RES (4)..(5): Xaa is C or S
PASXXVPARLSNITIQIM

SEQ ID NO: 13236 - protein, 16 aa, Artificial Sequence
  Cyclic GFR-binding peptide
LSNITIQIMDAANNVV

SEQ ID NO: 13237 - protein, 14 aa, Artificial Sequence
  Cyclic GFR-binding peptide
  MOD_RES (1)..(1): Xaa is C or S
XAPVKTSNITMQIM

SEQ ID NO: 13238 - protein, 17 aa, Artificial Sequence
  Cyclic GFR-binding peptide
KTSNITMQIMDNGRVLL

SEQ ID NO: 13239 - protein, 19 aa, Artificial Sequence
  Cyclic GFR-binding peptide
  MOD_RES (5)..(6): Xaa is C or S
TPPTXXVPTRLSNITIQIM

SEQ ID NO: 13240 - protein, 17 aa, Artificial Sequence
  Cyclic GFR-binding peptide
RLSNITIQIMDSANNVV

SEQ ID NO: 13241 - protein, 16 aa, Artificial Sequence
  Cyclic GFR-binding peptide
LSNITIQIMDSANNVV

SEQ ID NO: 13242 - protein, 22 aa, Artificial Sequence
  Cyclic GFR-binding peptide
  MOD_RES (6)..(7): Xaa is C or S
HVPKPXXAPTKLSNITVQIMDD

SEQ ID NO: 13243 - protein, 21 aa, Artificial Sequence
  Cyclic GFR-binding peptide
  MOD_RES (6)..(7): Xaa is C or S
STPPTXXVPTRLSNITIQIMD

SEQ ID NO: 13244 - protein, 21 aa, Artificial Sequence
  Cyclic GFR-binding peptide
  MOD_RES (6)..(7): Xaa is C or S
AAPASXXVPARLSNITIQIMD

SEQ ID NO: 13245 - protein, 18 aa, Artificial Sequence
  Cyclic GFR-binding peptide
  MOD_RES (4)..(5): Xaa is C or S
AGPXXTPTKMSNITMQIM

SEQ ID NO: 13246 - protein, 16 aa, Artificial Sequence
  Cyclic GFR-binding peptide
  MOD_RES (2)..(3): Xaa is C or S
PXXTPTKMSNITMQIM

SEQ ID NO: 13247 - protein, 25 aa, Artificial Sequence
  Cyclic GFR-binding peptide
  MOD_RES (6)..(7): Xaa is C or S
AAPASXXVPARLSNITIQIMDAANN

SEQ ID NO: 13248 - protein, 15 aa, Artificial Sequence
  Cyclic GFR-binding peptide
  MOD_RES (1)..(2): Xaa is C or S
XXVPARLSNITIQIM

SEQ ID NO: 13249 - protein, 26 aa, Artificial Sequence
  Cyclic GFR-binding peptide
  MOD_RES (6)..(7): Xaa is C or S
GSAGPXXTPTKMSNITMQIMNDKQQI

SEQ ID NO: 13250 - protein, 18 aa, Artificial Sequence
  Cyclic GFR-binding peptide
VKTSNITMQIMDNGRVLL

SEQ ID NO: 13251 - protein, 13 aa, Artificial Sequence
  Cyclic GFR-binding peptide
VPTRLSNITIQIM

SEQ ID NO: 13252 - protein, 15 aa, Artificial Sequence
  Cyclic GFR-binding peptide
  MOD_RES (1)..(2): Xaa is C or S
XXTPTKMSNITMQIM

SEQ ID NO: 13253 - protein, 25 aa, Artificial Sequence
  Cyclic GFR-binding peptide
  MOD_RES (6)..(7): Xaa is C or S
STPPTXXVPTRLSNITIQIMDSANN

SEQ ID NO: 13254 - protein, 16 aa, Artificial Sequence
  Cyclic GFR-binding peptide
  MOD_RES (2)..(3): Xaa is C or S
TXXVPTRLSNITIQIM

SEQ ID NO: 13255 - protein, 18 aa, Artificial Sequence
  Cyclic GFR-binding peptide
TRLSNITIQIMDSANNVV

SEQ ID NO: 13256 - protein, 26 aa, Artificial Sequence
  Cyclic GFR-binding peptide
  MOD_RES (6)..(7): Xaa is C or S
STPPTXXVPTRLSNITIQIMDSANNV

SEQ ID NO: 13257 - protein, 18 aa, Artificial Sequence
  Cyclic GFR-binding peptide
  MOD_RES (4)..(5): Xaa is C or S
PPTXXVPTRLSNITIQIM

SEQ ID NO: 13258 - protein, 17 aa, Artificial Sequence
  Cyclic GFR-binding peptide
  MOD_RES (3)..(4): Xaa is C or S
GPXXTPTKMSNITMQIM

SEQ ID NO: 13259 - protein, 13 aa, Artificial Sequence
  Cyclic GFR-binding peptide
TPTKMSNITMQIM

SEQ ID NO: 13260 - protein, 18 aa, Artificial Sequence
  Cyclic GFR-binding peptide
ARLSNITIQIMDAANNVV

SEQ ID NO: 13261 - protein, 22 aa, Artificial Sequence
  Cyclic GFR-binding peptide
  MOD_RES (6)..(7): Xaa is C or S
RVPSTXXAPVKTSNITMQIMDN

SEQ ID NO: 13262 - protein, 24 aa, Artificial Sequence
  Cyclic GFR-binding peptide
  MOD_RES (6)..(7): Xaa is C or S
STPPTXXVPTRLSNITIQIMDSAN

SEQ ID NO: 13263 - protein, 18 aa, Artificial Sequence
  Cyclic GFR-binding peptide
  MOD_RES (4)..(5): Xaa is C or S
PSTXXAPVKTSNITMQIM

SEQ ID NO: 13264 - protein, 17 aa, Artificial Sequence
  Cyclic GFR-binding peptide
RLSNITIQIMDAANNVV

SEQ ID NO: 13265 - protein, 17 aa, Artificial Sequence
  Cyclic GFR-binding peptide
  MOD_RES (3)..(4): Xaa is C or S
STXXAPVKTSNITMQIM

SEQ ID NO: 13266 - protein, 23 aa, Artificial Sequence
  Cyclic GFR-binding peptide
  MOD_RES (6)..(7): Xaa is C or S
RVPSTXXAPVKTSNITMQIMDNG

SEQ ID NO: 13267 - protein, 17 aa, Artificial Sequence
  Cyclic GFR-binding peptide
KMSNITMQIMNDKQQII

SEQ ID NO: 13268 - protein, 21 aa, Artificial Sequence
  Cyclic GFR-binding peptide
  MOD_RES (6)..(7): Xaa is C or S
RVPSTXXAPVKTSNITMQIMD

SEQ ID NO: 13269 - protein, 19 aa, Artificial Sequence
  Cyclic GFR-binding peptide
PARLSNITIQIMDAANNVV

SEQ ID NO: 13270 - protein, 26 aa, Artificial Sequence
  Cyclic GFR-binding peptide
  MOD_RES (6)..(7): Xaa is C or S
RVPSTXXAPVKTSNITMQIMDNGRVL

SEQ ID NO: 13271 - protein, 19 aa, Artificial Sequence
  Cyclic GFR-binding peptide
  MOD_RES (5)..(6): Xaa is C or S
APASXXVPARLSNITIQIM

SEQ ID NO: 13272 - protein, 17 aa, Artificial Sequence
  Cyclic GFR-binding peptide
  MOD_RES (3)..(4): Xaa is C or S
PTXXVPTRLSNITIQIM

SEQ ID NO: 13273 - protein, 22 aa, Artificial Sequence
  Cyclic GFR-binding peptide
  MOD_RES (6)..(7): Xaa is C or S
GSAGPXXTPTKMSNITMQIMND

SEQ ID NO: 13274 - protein, 18 aa, Artificial Sequence
  Cyclic GFR-binding peptide
TKMSNITMQIMNDKQQII

SEQ ID NO: 13275 - protein, 20 aa, Artificial Sequence
  Cyclic GFR-binding peptide
  MOD_RES (6)..(7): Xaa is C or S
STPPTXXVPTRLSNITIQIM

SEQ ID NO: 13276 - protein, 21 aa, Artificial Sequence
  Cyclic GFR-binding peptide
  MOD_RES (6)..(7): Xaa is C or S
GSAGPXXTPTKMSNITMQIMN

SEQ ID NO: 13277 - protein, 14 aa, Artificial Sequence
  Cyclic GFR-binding peptide
  MOD_RES (1)..(1): Xaa is C or S
XVPARLSNITIQIM

SEQ ID NO: 13278 - protein, 26 aa, Artificial Sequence
  Cyclic GFR-binding peptide
  MOD_RES (6)..(7): Xaa is C or S
AAPASXXVPARLSNITIQIMDAANNV

SEQ ID NO: 13279 - protein, 23 aa, Artificial Sequence
  Cyclic GFR-binding peptide
  MOD_RES (6)..(7): Xaa is C or S
STPPTXXVPTRLSNITIQIMDSA

SEQ ID NO: 13280 - protein, 19 aa, Artificial Sequence
  Cyclic GFR-binding peptide
  MOD_RES (5)..(6): Xaa is C or S
SAGPXXTPTKMSNITMQIM

SEQ ID NO: 13281 - protein, 19 aa, Artificial Sequence
  Cyclic GFR-binding peptide
PVKTSNITMQIMDNGRVLL

SEQ ID NO: 13282 - protein, 20 aa, Artificial Sequence
  Cyclic GFR-binding peptide
  MOD_RES (6)..(7): Xaa is C or S
AAPASXXVPARLSNITIQIM

SEQ ID NO: 13283 - protein, 22 aa, Artificial Sequence
  Cyclic GFR-binding peptide
  MOD_RES (16)..(17): Xaa is C or S
DDLYLVSIASLKTPAXXPKPVH

SEQ ID NO: 13284 - protein, 16 aa, Artificial Sequence
  Cyclic GFR-binding peptide
IIQQKDNLYLMSIASM

SEQ ID NO: 13285 - protein, 25 aa, Artificial Sequence
  Cyclic GFR-binding peptide
  MOD_RES (19)..(20): Xaa is C or S
NNAADLYLISIASLRAPVXXSAPAA

SEQ ID NO: 13286 - protein, 21 aa, Artificial Sequence
  Cyclic GFR-binding peptide
  MOD_RES (15)..(16): Xaa is C or S
NLYLMSIASMKTPTXXPGASG

SEQ ID NO: 13287 - protein, 15 aa, Artificial Sequence
  Cyclic GFR-binding peptide
  MOD_RES (14)..(15): Xaa is C or S
LYLISIASLRAPVXX

SEQ ID NO: 13288 - protein, 19 aa, Artificial Sequence
  Cyclic GFR-binding peptide
  MOD_RES (14)..(15): Xaa is C or S
LYLISIASMKEPVXXPEPI

SEQ ID NO: 13289 - protein, 14 aa, Artificial Sequence
  Cyclic GFR-binding peptide
  MOD_RES (14)..(14): Xaa is C or S
LYLISIASMKEPVX

SEQ ID NO: 13290 - protein, 14 aa, Artificial Sequence
  Cyclic GFR-binding peptide
  MOD_RES (14)..(14): Xaa is C or S
LYLMSIASTKVPAX

SEQ ID NO: 13291 - protein, 18 aa, Artificial Sequence
  Cyclic GFR-binding peptide
YTVVGKDLYLISIASLKT

SEQ ID NO: 13292 - protein, 27 aa, Artificial Sequence
  Cyclic GFR-binding peptide
  MOD_RES (21)..(22): Xaa is C or S
IVNSSDDLYLVSIASLKTPAXXPKPVH

SEQ ID NO: 13293 - protein, 22 aa, Artificial Sequence
  Cyclic GFR-binding peptide
  MOD_RES (16)..(17): Xaa is C or S
EDLYLISIASMKEPVXXPEPIG

SEQ ID NO: 13294 - protein, 15 aa, Artificial Sequence
  Cyclic GFR-binding peptide
VVNNAADLYLISIAS

SEQ ID NO: 13295 - protein, 20 aa, Artificial Sequence
  Cyclic GFR-binding peptide
  MOD_RES (14)..(15): Xaa is C or S
LYLMSIASTKVPAXXTSPVR

SEQ ID NO: 13296 - protein, 13 aa, Artificial Sequence
  Cyclic GFR-binding peptide
LYLISIASLRAPV

SEQ ID NO: 13297 - protein, 23 aa, Artificial Sequence
  Cyclic GFR-binding peptide
  MOD_RES (17)..(18): Xaa is C or S
SDDLYLVSIASLKTPAXXPKPVH

SEQ ID NO: 13298 - protein, 20 aa, Artificial Sequence
  Cyclic GFR-binding peptide
  MOD_RES (14)..(15): Xaa is C or S
LYLMSIASMKTPTXXPGASG

SEQ ID NO: 13299 - protein, 15 aa, Artificial Sequence
  Cyclic GFR-binding peptide
  MOD_RES (14)..(15): Xaa is C or S
LYLISIASMKEPVXX

SEQ ID NO: 13300 - protein, 25 aa, Artificial Sequence
  Cyclic GFR-binding peptide
  MOD_RES (19)..(20): Xaa is C or S
QQKDNLYLMSIASMKTPTXXPGASG

SEQ ID NO: 13301 - protein, 19 aa, Artificial Sequence
  Cyclic GFR-binding peptide
  MOD_RES (14)..(15): Xaa is C or S
LYLISIASLRAPVXXSAPA

SEQ ID NO: 13302 - protein, 21 aa, Artificial Sequence
  Cyclic GFR-binding peptide
  MOD_RES (15)..(16): Xaa is C or S
DLYLISIASLRAPVXXSAPAA

SEQ ID NO: 13303 - protein, 19 aa, Artificial Sequence
  Cyclic GFR-binding peptide
  MOD_RES (14)..(15): Xaa is C or S
LYLMSIASTKVPAXXTSPV

SEQ ID NO: 13304 - protein, 21 aa, Artificial Sequence
  Cyclic GFR-binding peptide
  MOD_RES (15)..(16): Xaa is C or S
DLYLISIASMKEPVXXPEPIG

SEQ ID NO: 13305 - protein, 17 aa, Artificial Sequence
  Cyclic GFR-binding peptide
  MOD_RES (14)..(15): Xaa is C or S
LYLMSIASMKTPTXXPG

SEQ ID NO: 13306 - protein, 13 aa, Artificial Sequence
  Cyclic GFR-binding peptide
LYLISIASMKEPV

SEQ ID NO: 13307 - protein, 26 aa, Artificial Sequence
  Cyclic GFR-binding peptide
  MOD_RES (20)..(21): Xaa is C or S
LVRGNDLYLMSIASTKVPAXXTSPVR

SEQ ID NO: 13308 - protein, 27 aa, Artificial Sequence
  Cyclic GFR-binding peptide
  MOD_RES (21)..(22): Xaa is C or S
VVNKNEDLYLISIASMKEPVXXPEPIG

SEQ ID NO: 13309 - protein, 15 aa, Artificial Sequence
  Cyclic GFR-binding peptide
IIQQKDNLYLMSIAS

SEQ ID NO: 13310 - protein, 14 aa, Artificial Sequence
  Cyclic GFR-binding peptide
  MOD_RES (14)..(14): Xaa is C or S
LYLISIASLKTPVX

SEQ ID NO: 13311 - protein, 27 aa, Artificial Sequence
  Cyclic GFR-binding peptide
  MOD_RES (21)..(22): Xaa is C or S
IIQQKDNLYLMSIASMKTPTXXPGASG

SEQ ID NO: 13312 - protein, 17 aa, Artificial Sequence
  Cyclic GFR-binding peptide
VVNKNEDLYLISIASMK

SEQ ID NO: 13313 - protein, 16 aa, Artificial Sequence
  Cyclic GFR-binding peptide
  MOD_RES (14)..(15): Xaa is C or S
LYLISIASLRAPVXXS

SEQ ID NO: 13314 - protein, 17 aa, Artificial Sequence
  Cyclic GFR-binding peptide
  MOD_RES (14)..(15): Xaa is C or S
LYLISIASLKTPVXXAK

SEQ ID NO: 13315 - protein, 14 aa, Artificial Sequence
  Cyclic GFR-binding peptide
  MOD_RES (14)..(14): Xaa is C or S
LYLMSIASMKTPTX

SEQ ID NO: 13316 - protein, 26 aa, Artificial Sequence
  Cyclic GFR-binding peptide
  MOD_RES (20)..(21): Xaa is C or S
VNNAADLYLISIASLRAPVXXSAPAA

SEQ ID NO: 13317 - protein, 20 aa, Artificial Sequence
  Cyclic GFR-binding peptide
  MOD_RES (14)..(15): Xaa is C or S
LYLISIASLKTPVXXAKSAK

SEQ ID NO: 13318 - protein, 18 aa, Artificial Sequence
  Cyclic GFR-binding peptide
LLVRGNDLYLMSIASTKV

SEQ ID NO: 13319 - protein, 24 aa, Artificial Sequence
  Cyclic GFR-binding peptide
  MOD_RES (18)..(19): Xaa is C or S
NAADLYLISIASLRAPVXXSAPAA

SEQ ID NO: 13320 - protein, 16 aa, Artificial Sequence
  Cyclic GFR-binding peptide
  MOD_RES (14)..(15): Xaa is C or S
LYLISIASMKEPVXXP

SEQ ID NO: 13321 - protein, 25 aa, Artificial Sequence
  Cyclic GFR-binding peptide
  MOD_RES (19)..(20): Xaa is C or S
VVGKDLYLISIASLKTPVXXAKSAK

SEQ ID NO: 13322 - protein, 15 aa, Artificial Sequence
  Cyclic GFR-binding peptide
  MOD_RES (14)..(15): Xaa is C or S
LYLISIASLKTPVXX

SEQ ID NO: 13323 - protein, 17 aa, Artificial Sequence
  Cyclic GFR-binding peptide
VVNNAADLYLISIASLR

SEQ ID NO: 13324 - protein, 19 aa, Artificial Sequence
  Cyclic GFR-binding peptide
VVNNAADLYLISIASLRAP

SEQ ID NO: 13325 - protein, 17 aa, Artificial Sequence
  Cyclic GFR-binding peptide
  MOD_RES (14)..(15): Xaa is C or S
LYLMSIASTKVPAXXTS

SEQ ID NO: 13326 - protein, 24 aa, Artificial Sequence
  Cyclic GFR-binding peptide
  MOD_RES (18)..(19): Xaa is C or S
SSDDLYLVSIASLKTPAXXPKPVH

SEQ ID NO: 13327 - protein, 15 aa, Artificial Sequence
  Cyclic GFR-binding peptide
LLVRGNDLYLMSIAS

SEQ ID NO: 13328 - protein, 18 aa, Artificial Sequence
  Cyclic GFR-binding peptide
  MOD_RES (14)..(15): Xaa is C or S
LYLMSIASTKVPAXXTSP

SEQ ID NO: 13329 - protein, 25 aa, Artificial Sequence
  Cyclic GFR-binding peptide
  MOD_RES (19)..(20): Xaa is C or S
VRGNDLYLMSIASTKVPAXXTSPVR

SEQ ID NO: 13330 - protein, 18 aa, Artificial Sequence
  Cyclic GFR-binding peptide
IIQQKDNLYLMSIASMKT

SEQ ID NO: 13331 - protein, 17 aa, Artificial Sequence
  Cyclic GFR-binding peptide
  MOD_RES (14)..(15): Xaa is C or S
LYLISIASMKEPVXXPE

SEQ ID NO: 13332 - protein, 16 aa, Artificial Sequence
  Cyclic GFR-binding peptide
  MOD_RES (14)..(15): Xaa is C or S
LYLMSIASTKVPAXXT

SEQ ID NO: 13333 - protein, 18 aa, Artificial Sequence
  Cyclic GFR-binding peptide
VVNKNEDLYLISIASMKE

SEQ ID NO: 13334 - protein, 23 aa, Artificial Sequence
  Cyclic GFR-binding peptide
  MOD_RES (17)..(18): Xaa is C or S
GNDLYLMSIASTKVPAXXTSPVR

SEQ ID NO: 13335 - protein, 16 aa, Artificial Sequence
  Cyclic GFR-binding peptide
  MOD_RES (14)..(15): Xaa is C or S
LYLMSIASMKTPTXXP

SEQ ID NO: 13336 - protein, 13 aa, Artificial Sequence
  Cyclic GFR-binding peptide
LYLISIASLKTPV

SEQ ID NO: 13337 - protein, 22 aa, Artificial Sequence
  Cyclic GFR-binding peptide
  MOD_RES (16)..(17): Xaa is C or S
KDLYLISIASLKTPVXXAKSAK

SEQ ID NO: 13338 - protein, 17 aa, Artificial Sequence
  Cyclic GFR-binding peptide
LLVRGNDLYLMSIASTK

SEQ ID NO: 13339 - protein, 19 aa, Artificial Sequence
  Cyclic GFR-binding peptide
IIQQKDNLYLMSIASMKTP

SEQ ID NO: 13340 - protein, 27 aa, Artificial Sequence
  Cyclic GFR-binding peptide
  MOD_RES (21)..(22): Xaa is C or S
VVNNAADLYLISIASLRAPVXXSAPAA

SEQ ID NO: 13341 - protein, 24 aa, Artificial Sequence
  Cyclic GFR-binding peptide
  MOD_RES (18)..(19): Xaa is C or S
VGKDLYLISIASLKTPVXXAKSAK

SEQ ID NO: 13342 - protein, 18 aa, Artificial Sequence
  Cyclic GFR-binding peptide
  MOD_RES (14)..(15): Xaa is C or S
LYLISIASLRAPVXXSAP

SEQ ID NO: 13343 - protein, 18 aa, Artificial Sequence
  Cyclic GFR-binding peptide
  MOD_RES (14)..(15): Xaa is C or S
LYLISIASMKEPVXXPEP

SEQ ID NO: 13344 - protein, 18 aa, Artificial Sequence
  Cyclic GFR-binding peptide
  MOD_RES (14)..(15): Xaa is C or S
LYLMSIASMKTPTXXPGA

SEQ ID NO: 13345 - protein, 24 aa, Artificial Sequence
  Cyclic GFR-binding peptide
  MOD_RES (18)..(19): Xaa is C or S
RGNDLYLMSIASTKVPAXXTSPVR

SEQ ID NO: 13346 - protein, 17 aa, Artificial Sequence
  Cyclic GFR-binding peptide
YTVVGKDLYLISIASLK

SEQ ID NO: 13347 - protein, 27 aa, Artificial Sequence
  Cyclic GFR-binding peptide
  MOD_RES (21)..(22): Xaa is C or S
LLVRGNDLYLMSIASTKVPAXXTSPVR

SEQ ID NO: 13348 - protein, 25 aa, Artificial Sequence
  Cyclic GFR-binding peptide
  MOD_RES (19)..(20): Xaa is C or S
NSSDDLYLVSIASLKTPAXXPKPVH

SEQ ID NO: 13349 - protein, 20 aa, Artificial Sequence
  Cyclic GFR-binding peptide
  MOD_RES (14)..(15): Xaa is C or S
LYLVSIASLKTPAXXPKPVH

SEQ ID NO: 13350 - protein, 18 aa, Artificial Sequence
  Cyclic GFR-binding peptide
VVNNAADLYLISIASLRA

SEQ ID NO: 13351 - protein, 16 aa, Artificial Sequence
  Cyclic GFR-binding peptide
  MOD_RES (14)..(15): Xaa is C or S
LYLISIASLKTPVXXA

SEQ ID NO: 13352 - protein, 16 aa, Artificial Sequence
  Cyclic GFR-binding peptide
LLVRGNDLYLMSIAST

SEQ ID NO: 13353 - protein, 24 aa, Artificial Sequence
  Cyclic GFR-binding peptide
  MOD_RES (18)..(19): Xaa is C or S
KNEDLYLISIASMKEPVXXPEPIG

SEQ ID NO: 13354 - protein, 21 aa, Artificial Sequence
  Cyclic GFR-binding peptide
  MOD_RES (15)..(16): Xaa is C or S
DLYLISIASLKTPVXXAKSAK

SEQ ID NO: 13355 - protein, 13 aa, Artificial Sequence
  Cyclic GFR-binding peptide
LYLMSIASMKTPT

SEQ ID NO: 13356 - protein, 16 aa, Artificial Sequence
  Cyclic GFR-binding peptide
VVNNAADLYLISIASL

SEQ ID NO: 13357 - protein, 25 aa, Artificial Sequence
  Cyclic GFR-binding peptide
  MOD_RES (19)..(20): Xaa is C or S
NKNEDLYLISIASMKEPVXXPEPIG

SEQ ID NO: 13358 - protein, 26 aa, Artificial Sequence
  Cyclic GFR-binding peptide
  MOD_RES (20)..(21): Xaa is C or S
VNKNEDLYLISIASMKEPVXXPEPIG

SEQ ID NO: 13359 - protein, 21 aa, Artificial Sequence
  Cyclic GFR-binding peptide
  MOD_RES (15)..(16): Xaa is C or S
DLYLVSIASLKTPAXXPKPVH

SEQ ID NO: 13360 - protein, 26 aa, Artificial Sequence
  Cyclic GFR-binding peptide
  MOD_RES (20)..(21): Xaa is C or S
TVVGKDLYLISIASLKTPVXXAKSAK

SEQ ID NO: 13361 - protein, 15 aa, Artificial Sequence
  Cyclic GFR-binding peptide
  MOD_RES (14)..(15): Xaa is C or S
LYLMSIASMKTPTXX

SEQ ID NO: 13362 - protein, 16 aa, Artificial Sequence
  Cyclic GFR-binding peptide
VVNKNEDLYLISIASM

SEQ ID NO: 13363 - protein, 15 aa, Artificial Sequence
  Cyclic GFR-binding peptide
YTVVGKDLYLISIAS

SEQ ID NO: 13364 - protein, 22 aa, Artificial Sequence
  Cyclic GFR-binding peptide
  MOD_RES (16)..(17): Xaa is C or S
ADLYLISIASLRAPVXXSAPAA

SEQ ID NO: 13365 - protein, 20 aa, Artificial Sequence
  Cyclic GFR-binding peptide
  MOD_RES (14)..(15): Xaa is C or S
LYLISIASMKEPVXXPEPIG

SEQ ID NO: 13366 - protein, 23 aa, Artificial Sequence
  Cyclic GFR-binding peptide
  MOD_RES (17)..(18): Xaa is C or S
NEDLYLISIASMKEPVXXPEPIG

SEQ ID NO: 13367 - protein, 20 aa, Artificial Sequence
  Cyclic GFR-binding peptide
  MOD_RES (14)..(15): Xaa is C or S
LYLISIASLRAPVXXSAPAA

SEQ ID NO: 13368 - protein, 26 aa, Artificial Sequence
  Cyclic GFR-binding peptide
  MOD_RES (20)..(21): Xaa is C or S
IQQKDNLYLMSIASMKTPTXXPGASG

SEQ ID NO: 13369 - protein, 23 aa, Artificial Sequence
  Cyclic GFR-binding peptide
  MOD_RES (17)..(18): Xaa is C or S
GKDLYLISIASLKTPVXXAKSAK

SEQ ID NO: 13370 - protein, 27 aa, Artificial Sequence
  Cyclic GFR-binding peptide
  MOD_RES (21)..(22): Xaa is C or S
YTVVGKDLYLISIASLKTPVXXAKSAK

SEQ ID NO: 13371 - protein, 19 aa, Artificial Sequence
  Cyclic GFR-binding peptide
VVNKNEDLYLISIASMKEP

SEQ ID NO: 13372 - protein, 22 aa, Artificial Sequence
  Cyclic GFR-binding peptide
  MOD_RES (16)..(17): Xaa is C or S
DNLYLMSIASMKTPTXXPGASG

SEQ ID NO: 13373 - protein, 21 aa, Artificial Sequence
  Cyclic GFR-binding peptide
  MOD_RES (15)..(16): Xaa is C or S
DLYLMSIASTKVPAXXTSPVR

SEQ ID NO: 13374 - protein, 17 aa, Artificial Sequence
  Cyclic GFR-binding peptide
  MOD_RES (14)..(15): Xaa is C or S
LYLISIASLRAPVXXSA

SEQ ID NO: 13375 - protein, 19 aa, Artificial Sequence
  Cyclic GFR-binding peptide
  MOD_RES (14)..(15): Xaa is C or S
LYLISIASLKTPVXXAKSA

SEQ ID NO: 13376 - protein, 16 aa, Artificial Sequence
  Cyclic GFR-binding peptide
YTVVGKDLYLISIASL

SEQ ID NO: 13377 - protein, 14 aa, Artificial Sequence
  Cyclic GFR-binding peptide
  MOD_RES (14)..(14): Xaa is C or S
LYLISIASLRAPVX

SEQ ID NO: 13378 - protein, 19 aa, Artificial Sequence
  Cyclic GFR-binding peptide
  MOD_RES (14)..(15): Xaa is C or S
LYLMSIASMKTPTXXPGAS

SEQ ID NO: 13379 - protein, 26 aa, Artificial Sequence
  Cyclic GFR-binding peptide
  MOD_RES (20)..(21): Xaa is C or S
VNSSDDLYLVSIASLKTPAXXPKPVH

SEQ ID NO: 13380 - protein, 19 aa, Artificial Sequence
  Cyclic GFR-binding peptide
LLVRGNDLYLMSIASTKVP

SEQ ID NO: 13381 - protein, 23 aa, Artificial Sequence
  Cyclic GFR-binding peptide
  MOD_RES (17)..(18): Xaa is C or S
KDNLYLMSIASMKTPTXXPGASG

SEQ ID NO: 13382 - protein, 22 aa, Artificial Sequence
  Cyclic GFR-binding peptide
  MOD_RES (16)..(17): Xaa is C or S
NDLYLMSIASTKVPAXXTSPVR

SEQ ID NO: 13383 - protein, 15 aa, Artificial Sequence
  Cyclic GFR-binding peptide
VVNKNEDLYLISIAS

SEQ ID NO: 13384 - protein, 19 aa, Artificial Sequence
  Cyclic GFR-binding peptide
YTVVGKDLYLISIASLKTP

SEQ ID NO: 13385 - protein, 13 aa, Artificial Sequence
  Cyclic GFR-binding peptide
LYLMSIASTKVPA

SEQ ID NO: 13386 - protein, 23 aa, Artificial Sequence
  Cyclic GFR-binding peptide
  MOD_RES (17)..(18): Xaa is C or S
AADLYLISIASLRAPVXXSAPAA

SEQ ID NO: 13387 - protein, 24 aa, Artificial Sequence
  Cyclic GFR-binding peptide
  MOD_RES (18)..(19): Xaa is C or S
QKDNLYLMSIASMKTPTXXPGASG

SEQ ID NO: 13388 - protein, 15 aa, Artificial Sequence
  Cyclic GFR-binding peptide
  MOD_RES (14)..(15): Xaa is C or S
LYLMSIASTKVPAXX

SEQ ID NO: 13389 - protein, 18 aa, Artificial Sequence
  Cyclic GFR-binding peptide
  MOD_RES (14)..(15): Xaa is C or S
LYLISIASLKTPVXXAKS

SEQ ID NO: 13390 - protein, 17 aa, Artificial Sequence
  Cyclic GFR-binding peptide
IIQQKDNLYLMSIASMK

SEQ ID NO: 13391 - protein, 22 aa, Artificial Sequence
  Cyclic GFR-binding peptide
  MOD_RES (6)..(7): Xaa is C or S
HVPKPXXAPTKLSAISVLYLDD

SEQ ID NO: 13392 - protein, 16 aa, Artificial Sequence
  Cyclic GFR-binding peptide
MSAISMLYLNDKQQII

SEQ ID NO: 13393 - protein, 25 aa, Artificial Sequence
  Cyclic GFR-binding peptide
  MOD_RES (6)..(7): Xaa is C or S
AAPASXXVPARLSAISILYLDAANN

SEQ ID NO: 13394 - protein, 21 aa, Artificial Sequence
  Cyclic GFR-binding peptide
  MOD_RES (6)..(7): Xaa is C or S
GSAGPXXTPTKMSAISMLYLN

SEQ ID NO: 13395 - protein, 15 aa, Artificial Sequence
  Cyclic GFR-binding peptide
  MOD_RES (1)..(2): Xaa is C or S
XXVPARLSAISILYL

SEQ ID NO: 13396 - protein, 19 aa, Artificial Sequence
  Cyclic GFR-binding peptide
  MOD_RES (5)..(6): Xaa is C or S
IPEPXXVPEKMSAISILYL

SEQ ID NO: 13397 - protein, 14 aa, Artificial Sequence
  Cyclic GFR-binding peptide
  MOD_RES (1)..(1): Xaa is C or S
XVPEKMSAISILYL

SEQ ID NO: 13398 - protein, 14 aa, Artificial Sequence
  Cyclic GFR-binding peptide
  MOD_RES (1)..(1): Xaa is C or S
XAPVKTSAISMLYL

SEQ ID NO: 13399 - protein, 18 aa, Artificial Sequence
  Cyclic GFR-binding peptide
TKLSAISILYLDKGVVTY

SEQ ID NO: 13400 - protein, 27 aa, Artificial Sequence
  Cyclic GFR-binding peptide
  MOD_RES (6)..(7): Xaa is C or S
HVPKPXXAPTKLSAISVLYLDDSSNVI

SEQ ID NO: 13401 - protein, 22 aa, Artificial Sequence
  Cyclic GFR-binding peptide
  MOD_RES (6)..(7): Xaa is C or S
GIPEPXXVPEKMSAISILYLDE

SEQ ID NO: 13402 - protein, 15 aa, Artificial Sequence
  Cyclic GFR-binding peptide
SAISILYLDAANNVV

SEQ ID NO: 13403 - protein, 20 aa, Artificial Sequence
  Cyclic GFR-binding peptide
  MOD_RES (6)..(7): Xaa is C or S
RVPSTXXAPVKTSAISMLYL

SEQ ID NO: 13404 - protein, 13 aa, Artificial Sequence
  Cyclic GFR-binding peptide
VPARLSAISILYL

SEQ ID NO: 13405 - protein, 23 aa, Artificial Sequence
  Cyclic GFR-binding peptide
  MOD_RES (6)..(7): Xaa is C or S
HVPKPXXAPTKLSAISVLYLDDS

SEQ ID NO: 13406 - protein, 20 aa, Artificial Sequence
  Cyclic GFR-binding peptide
  MOD_RES (6)..(7): Xaa is C or S
GSAGPXXTPTKMSAISMLYL

SEQ ID NO: 13407 - protein, 15 aa, Artificial Sequence
  Cyclic GFR-binding peptide
  MOD_RES (1)..(2): Xaa is C or S
XXVPEKMSAISILYL

SEQ ID NO: 13408 - protein, 25 aa, Artificial Sequence
  Cyclic GFR-binding peptide
  MOD_RES (6)..(7): Xaa is C or S
GSAGPXXTPTKMSAISMLYLNDKQQ

SEQ ID NO: 13409 - protein, 19 aa, Artificial Sequence
  Cyclic GFR-binding peptide
  MOD_RES (5)..(6): Xaa is C or S
APASXXVPARLSAISILYL

SEQ ID NO: 13410 - protein, 21 aa, Artificial Sequence
  Cyclic GFR-binding peptide
  MOD_RES (6)..(7): Xaa is C or S
AAPASXXVPARLSAISILYLD

SEQ ID NO: 13411 - protein, 19 aa, Artificial Sequence
  Cyclic GFR-binding peptide
  MOD_RES (5)..(6): Xaa is C or S
VPSTXXAPVKTSAISMLYL

SEQ ID NO: 13412 - protein, 21 aa, Artificial Sequence
  Cyclic GFR-binding peptide
  MOD_RES (6)..(7): Xaa is C or S
GIPEPXXVPEKMSAISILYLD

SEQ ID NO: 13413 - protein, 17 aa, Artificial Sequence
  Cyclic GFR-binding peptide
  MOD_RES (3)..(4): Xaa is C or S
GPXXTPTKMSAISMLYL

SEQ ID NO: 13414 - protein, 13 aa, Artificial Sequence
  Cyclic GFR-binding peptide
VPEKMSAISILYL

SEQ ID NO: 13415 - protein, 26 aa, Artificial Sequence
  Cyclic GFR-binding peptide
  MOD_RES (6)..(7): Xaa is C or S
RVPSTXXAPVKTSAISMLYLDNGRVL

SEQ ID NO: 13416 - protein, 27 aa, Artificial Sequence
  Cyclic GFR-binding peptide
  MOD_RES (6)..(7): Xaa is C or S
GIPEPXXVPEKMSAISILYLDENKNVV

SEQ ID NO: 13417 - protein, 15 aa, Artificial Sequence
  Cyclic GFR-binding peptide
SAISMLYLNDKQQII

SEQ ID NO: 13418 - protein, 14 aa, Artificial Sequence
  Cyclic GFR-binding peptide
  MOD_RES (1)..(1): Xaa is C or S
XVPTKLSAISILYL

SEQ ID NO: 13419 - protein, 27 aa, Artificial Sequence
  Cyclic GFR-binding peptide
  MOD_RES (6)..(7): Xaa is C or S
GSAGPXXTPTKMSAISMLYLNDKQQII

SEQ ID NO: 13420 - protein, 17 aa, Artificial Sequence
  Cyclic GFR-binding peptide
KMSAISILYLDENKNVV

SEQ ID NO: 13421 - protein, 16 aa, Artificial Sequence
  Cyclic GFR-binding peptide
  MOD_RES (2)..(3): Xaa is C or S
SXXVPARLSAISILYL

SEQ ID NO: 13422 - protein, 17 aa, Artificial Sequence
  Cyclic GFR-binding peptide
  MOD_RES (3)..(4): Xaa is C or S
KAXXVPTKLSAISILYL

SEQ ID NO: 13423 - protein, 14 aa, Artificial Sequence
  Cyclic GFR-binding peptide
  MOD_RES (1)..(1): Xaa is C or S
XTPTKMSAISMLYL

SEQ ID NO: 13424 - protein, 26 aa, Artificial Sequence
  Cyclic GFR-binding peptide
  MOD_RES (6)..(7): Xaa is C or S
AAPASXXVPARLSAISILYLDAANNV

SEQ ID NO: 13425 - protein, 20 aa, Artificial Sequence
  Cyclic GFR-binding peptide
  MOD_RES (6)..(7): Xaa is C or S
KASKAXXVPTKLSAISILYL

SEQ ID NO: 13426 - protein, 18 aa, Artificial Sequence
  Cyclic GFR-binding peptide
VKTSAISMLYLDNGRVLL

SEQ ID NO: 13427 - protein, 24 aa, Artificial Sequence
  Cyclic GFR-binding peptide
  MOD_RES (6)..(7): Xaa is C or S
AAPASXXVPARLSAISILYLDAAN

SEQ ID NO: 13428 - protein, 16 aa, Artificial Sequence
  Cyclic GFR-binding peptide
  MOD_RES (2)..(3): Xaa is C or S
PXXVPEKMSAISILYL

SEQ ID NO: 13429 - protein, 25 aa, Artificial Sequence
  Cyclic GFR-binding peptide
  MOD_RES (6)..(7): Xaa is C or S
KASKAXXVPTKLSAISILYLDKGVV

SEQ ID NO: 13430 - protein, 15 aa, Artificial Sequence
  Cyclic GFR-binding peptide
  MOD_RES (1)..(2): Xaa is C or S
XXVPTKLSAISILYL

SEQ ID NO: 13431 - protein, 17 aa, Artificial Sequence
  Cyclic GFR-binding peptide
RLSAISILYLDAANNVV

SEQ ID NO: 13432 - protein, 19 aa, Artificial Sequence
  Cyclic GFR-binding peptide
PARLSAISILYLDAANNVV

SEQ ID NO: 13433 - protein, 17 aa, Artificial Sequence
  Cyclic GFR-binding peptide
  MOD_RES (3)..(4): Xaa is C or S
STXXAPVKTSAISMLYL

SEQ ID NO: 13434 - protein, 24 aa, Artificial Sequence
  Cyclic GFR-binding peptide
  MOD_RES (6)..(7): Xaa is C or S
HVPKPXXAPTKLSAISVLYLDDSS

SEQ ID NO: 13435 - protein, 15 aa, Artificial Sequence
  Cyclic GFR-binding peptide
SAISMLYLDNGRVLL

SEQ ID NO: 13436 - protein, 18 aa, Artificial Sequence
  Cyclic GFR-binding peptide
  MOD_RES (4)..(5): Xaa is C or S
PSTXXAPVKTSAISMLYL

SEQ ID NO: 13437 - protein, 25 aa, Artificial Sequence
  Cyclic GFR-binding peptide
  MOD_RES (6)..(7): Xaa is C or S
RVPSTXXAPVKTSAISMLYLDNGRV

SEQ ID NO: 13438 - protein, 18 aa, Artificial Sequence
  Cyclic GFR-binding peptide
TKMSAISMLYLNDKQQII

SEQ ID NO: 13439 - protein, 17 aa, Artificial Sequence
  Cyclic GFR-binding peptide
  MOD_RES (3)..(4): Xaa is C or S
EPXXVPEKMSAISILYL

SEQ ID NO: 13440 - protein, 16 aa, Artificial Sequence
  Cyclic GFR-binding peptide
  MOD_RES (2)..(3): Xaa is C or S
TXXAPVKTSAISMLYL

SEQ ID NO: 13441 - protein, 18 aa, Artificial Sequence
  Cyclic GFR-binding peptide
EKMSAISILYLDENKNVV

SEQ ID NO: 13442 - protein, 23 aa, Artificial Sequence
  Cyclic GFR-binding peptide
  MOD_RES (6)..(7): Xaa is C or S
RVPSTXXAPVKTSAISMLYLDNG

SEQ ID NO: 13443 - protein, 16 aa, Artificial Sequence
  Cyclic GFR-binding peptide
  MOD_RES (2)..(3): Xaa is C or S
PXXTPTKMSAISMLYL

SEQ ID NO: 13444 - protein, 13 aa, Artificial Sequence
  Cyclic GFR-binding peptide
VPTKLSAISILYL

SEQ ID NO: 13445 - protein, 22 aa, Artificial Sequence
  Cyclic GFR-binding peptide
  MOD_RES (6)..(7): Xaa is C or S
KASKAXXVPTKLSAISILYLDK

SEQ ID NO: 13446 - protein, 17 aa, Artificial Sequence
  Cyclic GFR-binding peptide
KTSAISMLYLDNGRVLL

SEQ ID NO: 13447 - protein, 19 aa, Artificial Sequence
  Cyclic GFR-binding peptide
PTKMSAISMLYLNDKQQII

SEQ ID NO: 13448 - protein, 27 aa, Artificial Sequence
  Cyclic GFR-binding peptide
  MOD_RES (6)..(7): Xaa is C or S
AAPASXXVPARLSAISILYLDAANNVV

SEQ ID NO: 13449 - protein, 24 aa, Artificial Sequence
  Cyclic GFR-binding peptide
  MOD_RES (6)..(7): Xaa is C or S
KASKAXXVPTKLSAISILYLDKGV

SEQ ID NO: 13450 - protein, 18 aa, Artificial Sequence
  Cyclic GFR-binding peptide
  MOD_RES (4)..(5): Xaa is C or S
PASXXVPARLSAISILYL

SEQ ID NO: 13451 - protein, 18 aa, Artificial Sequence
  Cyclic GFR-binding peptide
  MOD_RES (4)..(5): Xaa is C or S
PEPXXVPEKMSAISILYL

SEQ ID NO: 13452 - protein, 18 aa, Artificial Sequence
  Cyclic GFR-binding peptide
  MOD_RES (4)..(5): Xaa is C or S
AGPXXTPTKMSAISMLYL

SEQ ID NO: 13453 - protein, 24 aa, Artificial Sequence
  Cyclic GFR-binding peptide
  MOD_RES (6)..(7): Xaa is C or S
RVPSTXXAPVKTSAISMLYLDNGR

SEQ ID NO: 13454 - protein, 17 aa, Artificial Sequence
  Cyclic GFR-binding peptide
KLSAISILYLDKGVVTY

SEQ ID NO: 13455 - protein, 27 aa, Artificial Sequence
  Cyclic GFR-binding peptide
  MOD_RES (6)..(7): Xaa is C or S
RVPSTXXAPVKTSAISMLYLDNGRVLL

SEQ ID NO: 13456 - protein, 25 aa, Artificial Sequence
  Cyclic GFR-binding peptide
  MOD_RES (6)..(7): Xaa is C or S
HVPKPXXAPTKLSAISVLYLDDSSN

SEQ ID NO: 13457 - protein, 20 aa, Artificial Sequence
  Cyclic GFR-binding peptide
  MOD_RES (6)..(7): Xaa is C or S
HVPKPXXAPTKLSAISVLYL

SEQ ID NO: 13458 - protein, 18 aa, Artificial Sequence
  Cyclic GFR-binding peptide
ARLSAISILYLDAANNVV

SEQ ID NO: 13459 - protein, 16 aa, Artificial Sequence
  Cyclic GFR-binding peptide
  MOD_RES (2)..(3): Xaa is C or S
AXXVPTKLSAISILYL

SEQ ID NO: 13460 - protein, 16 aa, Artificial Sequence
  Cyclic GFR-binding peptide
TSAISMLYLDNGRVLL

SEQ ID NO: 13461 - protein, 24 aa, Artificial Sequence
  Cyclic GFR-binding peptide
  MOD_RES (6)..(7): Xaa is C or S
GIPEPXXVPEKMSAISILYLDENK

SEQ ID NO: 13462 - protein, 21 aa, Artificial Sequence
  Cyclic GFR-binding peptide
  MOD_RES (6)..(7): Xaa is C or S
KASKAXXVPTKLSAISILYLD

SEQ ID NO: 13463 - protein, 13 aa, Artificial Sequence
  Cyclic GFR-binding peptide
TPTKMSAISMLYL

SEQ ID NO: 13464 - protein, 16 aa, Artificial Sequence
  Cyclic GFR-binding peptide
LSAISILYLDAANNVV

SEQ ID NO: 13465 - protein, 25 aa, Artificial Sequence
  Cyclic GFR-binding peptide
  MOD_RES (6)..(7): Xaa is C or S
GIPEPXXVPEKMSAISILYLDENKN

SEQ ID NO: 13466 - protein, 26 aa, Artificial Sequence
  Cyclic GFR-binding peptide
  MOD_RES (6)..(7): Xaa is C or S
GIPEPXXVPEKMSAISILYLDENKNV

SEQ ID NO: 13467 - protein, 21 aa, Artificial Sequence
  Cyclic GFR-binding peptide
  MOD_RES (6)..(7): Xaa is C or S
HVPKPXXAPTKLSAISVLYLD

SEQ ID NO: 13468 - protein, 26 aa, Artificial Sequence
  Cyclic GFR-binding peptide
  MOD_RES (6)..(7): Xaa is C or S
KASKAXXVPTKLSAISILYLDKGVVT

SEQ ID NO: 13469 - protein, 15 aa, Artificial Sequence
  Cyclic GFR-binding peptide
  MOD_RES (1)..(2): Xaa is C or S
XXTPTKMSAISMLYL

SEQ ID NO: 13470 - protein, 16 aa, Artificial Sequence
  Cyclic GFR-binding peptide
MSAISILYLDENKNVV

SEQ ID NO: 13471 - protein, 15 aa, Artificial Sequence
  Cyclic GFR-binding peptide
SAISILYLDKGVVTY

SEQ ID NO: 13472 - protein, 22 aa, Artificial Sequence
  Cyclic GFR-binding peptide
  MOD_RES (6)..(7): Xaa is C or S
AAPASXXVPARLSAISILYLDA

SEQ ID NO: 13473 - protein, 20 aa, Artificial Sequence
  Cyclic GFR-binding peptide
  MOD_RES (6)..(7): Xaa is C or S
GIPEPXXVPEKMSAISILYL

SEQ ID NO: 13474 - protein, 23 aa, Artificial Sequence
  Cyclic GFR-binding peptide
  MOD_RES (6)..(7): Xaa is C or S
GIPEPXXVPEKMSAISILYLDEN

SEQ ID NO: 13475 - protein, 20 aa, Artificial Sequence
  Cyclic GFR-binding peptide
  MOD_RES (6)..(7): Xaa is C or S
AAPASXXVPARLSAISILYL

SEQ ID NO: 13476 - protein, 26 aa, Artificial Sequence
  Cyclic GFR-binding peptide
  MOD_RES (6)..(7): Xaa is C or S
GSAGPXXTPTKMSAISMLYLNDKQQI

SEQ ID NO: 13477 - protein, 23 aa, Artificial Sequence
  Cyclic GFR-binding peptide
  MOD_RES (6)..(7): Xaa is C or S
KASKAXXVPTKLSAISILYLDKG

SEQ ID NO: 13478 - protein, 27 aa, Artificial Sequence
  Cyclic GFR-binding peptide
  MOD_RES (6)..(7): Xaa is C or S
KASKAXXVPTKLSAISILYLDKGVVTY

SEQ ID NO: 13479 - protein, 19 aa, Artificial Sequence
  Cyclic GFR-binding peptide
PEKMSAISILYLDENKNVV

SEQ ID NO: 13480 - protein, 22 aa, Artificial Sequence
  Cyclic GFR-binding peptide
  MOD_RES (6)..(7): Xaa is C or S
GSAGPXXTPTKMSAISMLYLND

SEQ ID NO: 13481 - protein, 21 aa, Artificial Sequence
  Cyclic GFR-binding peptide
  MOD_RES (6)..(7): Xaa is C or S
RVPSTXXAPVKTSAISMLYLD

SEQ ID NO: 13482 - protein, 17 aa, Artificial Sequence
  Cyclic GFR-binding peptide
  MOD_RES (3)..(4): Xaa is C or S
ASXXVPARLSAISILYL

SEQ ID NO: 13483 - protein, 19 aa, Artificial Sequence
  Cyclic GFR-binding peptide
  MOD_RES (5)..(6): Xaa is C or S
ASKAXXVPTKLSAISILYL

SEQ ID NO: 13484 - protein, 16 aa, Artificial Sequence
  Cyclic GFR-binding peptide
LSAISILYLDKGVVTY

SEQ ID NO: 13485 - protein, 14 aa, Artificial Sequence
  Cyclic GFR-binding peptide
  MOD_RES (1)..(1): Xaa is C or S
XVPARLSAISILYL

SEQ ID NO: 13486 - protein, 19 aa, Artificial Sequence
  Cyclic GFR-binding peptide
  MOD_RES (5)..(6): Xaa is C or S
SAGPXXTPTKMSAISMLYL

SEQ ID NO: 13487 - protein, 26 aa, Artificial Sequence
  Cyclic GFR-binding peptide
  MOD_RES (6)..(7): Xaa is C or S
HVPKPXXAPTKLSAISVLYLDDSSNV

SEQ ID NO: 13488 - protein, 19 aa, Artificial Sequence
  Cyclic GFR-binding peptide
PVKTSAISMLYLDNGRVLL

SEQ ID NO: 13489 - protein, 23 aa, Artificial Sequence
  Cyclic GFR-binding peptide
  MOD_RES (6)..(7): Xaa is C or S
GSAGPXXTPTKMSAISMLYLNDK

SEQ ID NO: 13490 - protein, 22 aa, Artificial Sequence
  Cyclic GFR-binding peptide
  MOD_RES (6)..(7): Xaa is C or S
RVPSTXXAPVKTSAISMLYLDN

SEQ ID NO: 13491 - protein, 15 aa, Artificial Sequence
  Cyclic GFR-binding peptide
SAISILYLDENKNVV

SEQ ID NO: 13492 - protein, 19 aa, Artificial Sequence
  Cyclic GFR-binding peptide
PTKLSAISILYLDKGVVTY

SEQ ID NO: 13493 - protein, 13 aa, Artificial Sequence
  Cyclic GFR-binding peptide
APVKTSAISMLYL

SEQ ID NO: 13494 - protein, 23 aa, Artificial Sequence
  Cyclic GFR-binding peptide
  MOD_RES (6)..(7): Xaa is C or S
AAPASXXVPARLSAISILYLDAA

SEQ ID NO: 13495 - protein, 24 aa, Artificial Sequence
  Cyclic GFR-binding peptide
  MOD_RES (6)..(7): Xaa is C or S
GSAGPXXTPTKMSAISMLYLNDKQ

SEQ ID NO: 13496 - protein, 15 aa, Artificial Sequence
  Cyclic GFR-binding peptide
  MOD_RES (1)..(2): Xaa is C or S
XXAPVKTSAISMLYL

SEQ ID NO: 13497 - protein, 18 aa, Artificial Sequence
  Cyclic GFR-binding peptide
  MOD_RES (4)..(5): Xaa is C or S
SKAXXVPTKLSAISILYL

SEQ ID NO: 13498 - protein, 17 aa, Artificial Sequence
  Cyclic GFR-binding peptide
KMSAISMLYLNDKQQII

SEQ ID NO: 13499 - protein, 7 aa, Artificial Sequence
  Building block peptide "PEP"
  MOD_RES (6)..(7): Xaa is C or S
KIPKAXX

SEQ ID NO: 13500 - protein, 7 aa, Artificial Sequence
  Building block peptide "PEP"
  MOD_RES (6)..(7): Xaa is C or S
GIPEPXX

SEQ ID NO: 13501 - protein, 7 aa, Artificial Sequence
  Building block peptide "PEP"
  MOD_RES (6)..(7): Xaa is C or S
SIPKAXX

SEQ ID NO: 13502 - protein, 7 aa, Artificial Sequence
  Building block peptide "PEP"
  MOD_RES (7)..(7): Xaa is C or S
HVTKPTX

SEQ ID NO: 13503 - protein, 7 aa, Artificial Sequence
  Building block peptide "PEP"
  MOD_RES (6)..(7): Xaa is C or S
YVPKPXX

SEQ ID NO: 13504 - protein, 7 aa, Artificial Sequence
  Building block peptide "PEP"
  MOD_RES (6)..(7): Xaa is C or S
TVPKPXX

SEQ ID NO: 13505 - protein, 7 aa, Artificial Sequence
  Building block peptide "PEP"
  MOD_RES (6)..(7): Xaa is C or S
AVPKAXX

SEQ ID NO: 13506 - protein, 7 aa, Artificial Sequence
  Building block peptide "PEP"
  MOD_RES (6)..(7): Xaa is C or S
KVGKAXX

SEQ ID NO: 13507 - protein, 7 aa, Artificial Sequence
  Building block peptide "PEP"
  MOD_RES (6)..(7): Xaa is C or S
KASKAXX

SEQ ID NO: 13508 - protein, 7 aa, Artificial Sequence
  Building block peptide "PEP"
  MOD_RES (6)..(7): Xaa is C or S
GSAGPXX

SEQ ID NO: 13509 - protein, 7 aa, Artificial Sequence
  Building block peptide "PEP"
  MOD_RES (6)..(7): Xaa is C or S
AAPASXX

SEQ ID NO: 13510 - protein, 7 aa, Artificial Sequence
  Building block peptide "PEP"
  MOD_RES (6)..(7): Xaa is C or S
STPPTXX

SEQ ID NO: 13511 - protein, 7 aa, Artificial Sequence
  Building block peptide "PEP"
  MOD_RES (6)..(7): Xaa is C or S
HVPKPXX

SEQ ID NO: 13512 - protein, 7 aa, Artificial Sequence
  Building block peptide "PEP"
  MOD_RES (6)..(7): Xaa is C or S
RVPSTXX

SEQ ID NO: 13513 - protein, 7 aa, Artificial Sequence
  Building block peptide "PEP"
  MOD_RES (6)..(7): Xaa is C or S
ASAAPXX

SEQ ID NO: 13514 - protein, 7 aa, Artificial Sequence
  Building block peptide "PEP"
  MOD_RES (6)..(7): Xaa is C or S
ASASPXX

SEQ ID NO: 13515 - protein, 7 aa, Artificial Sequence
  Building block peptide "PEP"
  MOD_RES (7)..(7): Xaa is C or S
NDEGLEX

SEQ ID NO: 13516 - protein, 7 aa, Artificial Sequence
  Building block peptide "PEP"
  MOD_RES (5)..(5): Xaa is C or S
SSVKXQP

SEQ ID NO: 13517 - protein, 7 aa, Artificial Sequence
  Building block peptide "PEP"
  MOD_RES (5)..(5): Xaa is C or S
RNVQXRP

SEQ ID NO: 13518 - protein, 4 aa, Artificial Sequence
  Building block peptide "PEP"
SAIS

SEQ ID NO: 13519 - protein, 4 aa, Artificial Sequence
  Building block peptide "PEP"
SSLS

SEQ ID NO: 13520 - protein, 4 aa, Artificial Sequence
  Building block peptide "PEP"
NAIS

SEQ ID NO: 13521 - protein, 4 aa, Artificial Sequence
  Building block peptide "PEP"
SATS

SEQ ID NO: 13522 - protein, 4 aa, Artificial Sequence
  Building block peptide "PEP"
SPIS

SEQ ID NO: 13523 - protein, 4 aa, Artificial Sequence
  Building block peptide "PEP"
EPIS

SEQ ID NO: 13524 - protein, 4 aa, Artificial Sequence
  Building block peptide "PEP"
SPIN

SEQ ID NO: 13525 - protein, 4 aa, Artificial Sequence
  Building block peptide "PEP"
KPLS

SEQ ID NO: 13526 - protein, 4 aa, Artificial Sequence
  Building block peptide "PEP"
EPLP

SEQ ID NO: 13527 - protein, 4 aa, Artificial Sequence
  Building block peptide "PEP"
EPLT

SEQ ID NO: 13528 - protein, 4 aa, Artificial Sequence
  Building block peptide "PEP"
SNIT

SEQ ID NO: 13529 - protein, 4 aa, Artificial Sequence
  Building block peptide "PEP"
RSVK

SEQ ID NO: 13530 - protein, 4 aa, Artificial Sequence
  Building block peptide "PEP"
RPVQ

SEQ ID NO: 13531 - protein, 7 aa, Artificial Sequence
  Building block peptide "PEP"
DENEKVV

SEQ ID NO: 13532 - protein, 7 aa, Artificial Sequence
  Building block peptide "PEP"
DENKNVV

SEQ ID NO: 13533 - protein, 7 aa, Artificial Sequence
  Building block peptide "PEP"
DEYDKVV

SEQ ID NO: 13534 - protein, 7 aa, Artificial Sequence
  Building block peptide "PEP"
DDSSNVI

SEQ ID NO: 13535 - protein, 7 aa, Artificial Sequence
  Building block peptide "PEP"
DSSNNVI

SEQ ID NO: 13536 - protein, 7 aa, Artificial Sequence
  Building block peptide "PEP"
DDMGVPT

SEQ ID NO: 13537 - protein, 7 aa, Artificial Sequence
  Building block peptide "PEP"
DKGVVTY

SEQ ID NO: 13538 - protein, 7 aa, Artificial Sequence
  Building block peptide "PEP"
NDKQQII

SEQ ID NO: 13539 - protein, 7 aa, Artificial Sequence
  Building block peptide "PEP"
DAANNVV

SEQ ID NO: 13540 - protein, 7 aa, Artificial Sequence
  Building block peptide "PEP"
DSANNVV

SEQ ID NO: 13541 - protein, 7 aa, Artificial Sequence
  Building block peptide "PEP"
DNGRVLL

SEQ ID NO: 13542 - protein, 7 aa, Artificial Sequence
  Building block peptide "PEP"
VGRKPKV

SEQ ID NO: 13543 - protein, 7 aa, Artificial Sequence
  Building block peptide "PEP"
IGKTPKI

SEQ ID NO: 13544 - protein, 7 aa, Artificial Sequence
  Building block peptide "PEP"
VGRTPKV

SEQ ID NO: 13545 - protein, 9 aa, Artificial Sequence
  Building block peptide "PEP"
RIKPHQGQH

SEQ ID NO: 13546 - protein, 9 aa, Artificial Sequence
  Building block peptide "PEP"
EYVRKKPKL

SEQ ID NO: 13547 - protein, 9 aa, Artificial Sequence
  Building block peptide "PEP"
EIVRKKPIF
